(19) United States
(12) Patent Application Publication
(10) Pub. No.: US 2025/0130221 A1
(43) Pub. Date: Apr. 24, 2025

(54) METHOD OF IDENTIFYING AGENTS FOR THE TREATMENT OF CYSTIC FIBROSIS CAUSED BY THE MUTATION F508DEL

(71) Applicant: FACULDADE DE CIÊNCIAS DA UNIVERSIDADE DE LISBOA, LISBOA (PT)

(72) Inventors: Margarida DE AMARAL, LISBOA (PT); Hugo Miguel RAPOSO CORREIA BOTELHO, BOBADELA LRS (PT); Miquéias LOPES-PACHECO, LISBOA (PT)

(21) Appl. No.: 18/835,591

(22) PCT Filed: Feb. 27, 2023
(86) PCT No.: PCT/IB2023/051813

§ 371 Date: Aug. 2, 2024

(30) Foreign Application Priority Data
Feb. 25, 2022 (PT) 117811

(51) Int. Cl. G01N 33/50; A61K 31/405; A61P 43/00; G01N 33/68

(52) U.S. Cl. CPC G01N 33/5023; A61K 31/405; A61P 43/00; G01N 33/6893; G01N 2333/4703; G01N 2333/91215; G01N 2333/9124; G01N 2500/10

(57) ABSTRACT

A method of identifying agents for the treatment of Cystic Fibrosis (CF) caused by the mutation F508del in the gene encoding the cystic fibrosis transmembrane conductance regulator protein (F508del-CFTR), wherein a candidate agent contacts with at least one gene sequence selected from SEQ ID NOs: 228 to 478 or with its protein product as therapeutic targets. The ability of the candidate agent to modulate the activity of the F508del-CFTR protein and its plasma membrane traffic is determined. Gene sequences SEQ ID NOs: 228 to 478 were identified by a high-throughput siRNA cell-based microscopy screen aimed at identifying genes which enhance F508del-CFTR plasma membrane levels upon knock-down, as potential candidates for drug therapy in the treatment of CF. Further disclosing formulations comprising agents capable of targeting at least one gene sequence selected from SEQ ID NOs: 228 to 478 or their protein product.

### TECHNICAL FIELD

[0001] This application relates to a method of identifying agents for the treatment of Cystic Fibrosis caused by the mutation F508del in the gene encoding the cystic fibrosis transmembrane conductance regulator protein (F508del-CFTR), and compositions comprising said agent.

### BACKGROUND ART

[0002] About 80% of individuals with Cystic Fibrosis (CF), a life-shortening disease affecting >90,000 individuals worldwide predominantly with respiratory symptoms, have F508del. This mutation causes the CF transmembrane conductance regulator (CFTR) protein to misfold and being targeted by the endoplasmic reticulum (ER) quality control (ERQC) for premature degradation, thus preventing its plasma membrane (PM) traffic. Despite the recent approval of a ‘highly effective’ drug combination rescuing F508del-CFTR, maximal lung function improvement is ˜14% and the drug-targeted genes remain unknown.

[0003] Mutations in the gene encoding the Cystic Fibrosis Transmembrane Conductance Regulator (CFTR) protein (Riordan et al., 1989) cause Cystic Fibrosis (CF), the most common life-shortening autosomal recessive disease (median age at death ˜37 years (MacKenzie et al., 2014)) affecting >90,000 individuals worldwide. CFTR is a chloride (Cl⁻) and bicarbonate (HCO₃⁻) channel expressed at the apical membrane of several epithelial tissues, notably in the airways, which are the most affected organ in CF. In the airways, CFTR maintains epithelial ion homeostasis and fluid secretion/hydration of the airway surface liquid (ASL) and dysfunctional CFTR leads to ASL dehydration and persistence of an immovable thick mucus which obstructs the airway and prevents mucociliary clearance (MCC) thus potentiating chronic inflammation and recurrent bacterial infections that, over time, lead to progressive deterioration of lung function, the most frequent cause of morbidity and mortality in CF.

[0004] Among the >2,100 CFTR mutations so far reported (2021), the deletion of residue phenylalanine 508—F508del—is the most common, occurring in ˜80% of CF cases worldwide, being thus a preferential target for research and drug development in CF. F508del-CFTR presents several defects, namely: i) protein misfolding which is resilient to physiological rescue by endogenous molecular chaperones; ii) deficient PM traffic due to retention of misfolded F508del-CFTR at several checkpoints of the ER quality control (ERQC) machinery (Amaral, 2004) which target it for premature degradation via the ubiquitin (Ub)-proteasomal pathway (UPP); iii) impaired function, as the residual amount of F508del-CFTR that reaches the PM (only in some patients) has very low activity, due to a defect in the channel gating (Dalemans et al., 1991); iv) PM instability of rescued F508del-CFTR as it is quickly endocytosed and degraded (Moniz et al., 2013; Okiyoneda et al., 2013).

[0005] Nevertheless, early studies have shown that F508del-CFTR can be released from the ER to the PM, namely by low temperature incubation of cells heterologously expressing the mutant (Denning et al., 1992). This was valid proof-of-principle to demonstrate that F508del-CFTR ER retention can be rescued. However, only recently a triple drug, combining two correctors—tezacaftor and elexacaftor—to rescue the PM traffic of F508del-CFTR with a potentiator—ivacaftor—to rescue the gating defect in individuals with CF and at least one F508del mutation was shown to be efficacious (Middleton et al., 2019; Taylor-Cousar et al., 2017)). Nevertheless, the maximum clinical benefit of this ‘highly effective’ triple combo drug is an increase in lung function by only ˜14%, with some variability, likely due to the influence of modifier genes modulating the efficacy of the response to the drug.

[0006] Despite evidence that one of these correctors (tezacaftor) binds to mutant CFTR (Farinha et al., 2013a; He et al., 2013; Lopes-Pacheco et al., 2020; Okiyoneda et al., 2013; Fiedorczuk et al., 2022), the mechanism of action (MoA) for the second corrector (elexacaftor) remains unknown. Thus, identifying the multiple intervenients assessing CFTR folding at the ERQC checkpoints (Amaral and Farinha, 2013; Farinha and Amaral, 2005) will likely shed some light into the MoA of this and future traffic-rescuing drugs (Amaral, 2021) being crucial for the development of rationale and therapeutic strategies that significantly increase the efficacy of F508del-CFTR rescue. This strategy may also enable rescue of other folding CFTR mutants, and/or numerous misfolded proteins causing traffic disorders (Yarwood et al., 2020).

[0007] The complex ERQC process by which CFTR folding is assessed has been proposed to consist in main four sequential checkpoints (Amaral et al., 2016; Farinha and Amaral, 2005; Farinha and Canato, 2017; Farinha et al., 2013a; Farinha et al., 2013b; Younger et al., 2006), namely through: 1) interaction with the Hsp70 chaperone machinery where most F508del-CFTR is degraded; 2) the calnexin folding cycle; 3) exposure to an as yet unidentified machinery of arginine-framed tripeptides (AFT: Arg-X-Arg), four of which are present in CFTR; 4) export from the ER exit sites into coat protein (COP) II-coated vesicles mediated by a di-acidic exit code (Asp565-Ala-Asp567) present in CFTR (Nishimura and Balch, 1997; Wang et al., 2004). Failure to overcome one or more of these checkpoints inevitably leads to CFTR retention in the ER and subsequent degradation via UPP.

[0008] Most of the knowledge on these ERQC checkpoints has relied on studies with second-site “revertant” mutations which render F508del-CFTR less susceptible to UPP at each of these individual checkpoints (Amaral and Farinha, 2013). These revertants have also enabled dissecting the mechanism of action of corrector drugs (Farinha et al., 2013a). Nevertheless, the factors that retain F508del-CFTR at each of the above ERQC checkpoints have only been partially elucidated by hypothesis-driven approaches, remaining the global cellular machinery responsible for the ERQC of F508del-CFTR still unveiled.

### SUMMARY

[0009] The present invention relates to a method of identifying agents for the treatment of Cystic Fibrosis caused by the mutation F508del in the gene encoding the transmembrane conductance regulator protein (F508del-CFTR) comprising the steps of:
[0010] a) contacting a candidate agent with at least one gene sequence selected from Seq.ID: 228 to 478 or with at least one of its protein products of Seq.ID: 1 to 227 as therapeutic targets;
[0011] b) determining whether the candidate agent modulates the activity of the F508del-CFTR protein and its plasma membrane traffic.

[0012] In one embodiment at least one gene sequence is selected from Seq.ID: 232, 237, 238, 250, 253, 257, 259, 263, 276, 285, 296, 297, 301, 317, 318, 319, 333, 338, 369, 378, 396, 401, 405, 409, 410, 411, 417, 420, 421, 430, 442, 450, 458, 459, 471, 472 and 478.

[0013] In one embodiment the activity modulation is affected by inhibiting gene expression of at least one gene sequence selected from Seq.ID: 228 to 478 or the activity of at least one of its protein products of Seq.ID: 1 to 227.

[0014] In one embodiment the candidate agents identified inhibit the activity of at least one gene sequence selected from Seq.ID: 228 to 478 or the activity of at least one of its protein products of Seq.ID: 1 to 227 by more than 20% relative to the activity in the absence of the candidate agent.

[0015] In one embodiment the inhibition is affected by reducing gene expression of at least one gene sequence selected from Seq.ID: 228 to 478.

[0016] In one embodiment the activity is inhibited on the protein level of at least one protein sequence selected from Seq.ID: 1 to 227.

[0017] In one embodiment the ability of the candidate agent to bind to a protein product, or a domain thereof, from at least one gene sequence selected from Seq.ID: 228 to 478 or from at least one protein sequence from Seq.ID: 1 to 227 is determined.

[0018] In one embodiment the gene sequence protein products are TPK1, LRRK1, STYK1, GRK5 or DGKG.

[0019] In one embodiment (R,Z)-3-((4-(2-Bromoacetamido)-3,5-dimethyl-1H-pyrrol-2-yl)-methylene)-2-oxo-N-(1-phenylethyl)indoline-5-carboxamide is the candidate agent.

[0020] In one embodiment the method is carried out as a high-throughput assay.

[0021] In one embodiment the method is carried out as a cell-based assay.

[0022] The present invention also relates to an agent for use in the treatment of Cystic Fibrosis caused by the mutation F508del in the gene encoding the CFTR protein identified by the method.

[0023] In one embodiment the agent is (R,Z)-3-((4-(2-Bromoacetamido)-3,5-dimethyl-1H-pyrrol-2-yl)-methylene)-2-oxo-N-(1-phenylethyl)indoline-5-carboxamide.

[0024] The present invention also relates to a pharmaceutical composition comprising the agent identified by the method.

[0025] In one embodiment the pharmaceutical composition further comprises at least one pharmaceutically acceptable diluent, carrier, adjuvant or an excipient.

### GENERAL DESCRIPTION

[0026] The present invention relates to a method of identifying agents for the treatment of Cystic Fibrosis caused by the mutation F508del in the gene encoding CFTR.

[0027] To identify global modulators of F508del traffic, a high-content siRNA microscopy-based screen of >9,000 genes and monitorization F508del-CFTR PM rescue in human airway cells was performed. This primary screen identified the protein products of 227 genes as F508del-CFTR traffic regulators, of which at least 35 were validated by additional siRNAs, being thus further characterized. Subsequent mechanistic studies established GRK5 as a robust regulator whose inhibition rescues F508del-CFTR PM traffic, thus emerging as a novel potential drug target for CF.

[0028] There still exist unknown cellular factors that retain F508del-CFTR in the ER. A High-Throughput (HT) microscopy platform combined with siRNA knock-down (KD) to screen for global candidate regulators of F508del-CFTR PM traffic was applied with the ultimate goal of discovering novel potential drug targets for CF. To this end, a previously reported cell-based microscopy traffic assay combined with siRNA KDs was used to screen a library of 27,312 siRNAs by HT fluorescence microscopy (Amaral et al., 2016; Botelho et al., 2015). After validation, mechanistic classification according to the ERQC checkpoints and assessment of CFTR rescue additivity with the state-of-the art folding correctors, five kinase proteins were selected, and their MoA studied. Of these, G Protein-Coupled Receptor Kinase 5 (GRK5) was selected for detailed studies. GRK5 was found to rescue F508del-CFTR traffic and function upon inhibition with siRNAs or a recently reported selective inhibitor—(R,Z)-3-((4-(2-Bromoacetamido)-3,5-dimethyl-1H-pyrrol-2-yl)-methylene)-2-oxo-N-(1-phenylethyl)indoline-5-carboxamide—in a manner additive to CFTR correctors.

[0029] GRK5 is among those proposed as a potential new therapeutic target for CF since GRK5 inhibition may functionally release F508del-CFTR from the ER.

### BRIEF DESCRIPTION OF DRAWINGS

[0030] For easier understanding of this application, figures are attached in the annex that represent the preferred forms of implementation which nevertheless are not intended to limit the technique disclosed herein.

[0031] FIG. 1. Workflow of siRNA-based F508del-CFTR traffic screens. (A) The primary microscopy-based screen was based on screening the Ambion extended druggable genome siRNA library with a CFBE cell line expressing a mCherry-Flag-F508del-CFTR traffic reporter (Botelho et al., 2015). The library encompasses nearly half of the human genome (9128 genes, almost all of which targeted by 3 individual siRNAs. A subset of the siRNAs was discarded for targeting multiple or non-protein-coding genes (as of Ensembl 78), or due to damages in the assay plates. The primary screen highlighted 228 hit siRNAs—targeting 227 genes—which produced significant increases in F508del-CFTR delivery to the PM. Most of the primary screen hit genes (225 genes) were re-screened with additional siRNAs (2 siRNAs/gene). A total of 35 genes, targeted by 70 siRNAs, were confirmed as hits. For complementary validation studies a library of siRNAs targeting the 35 confirmed hit genes, as well as on two additional kinases (DGKG, GRK5) which were part of the primary screen hits. Significant increases in F508del-CFTR glycosylation (Western blot) or function (hsYFP quenching) were achieved by knocking down 36 or 21 of these genes. The overlap between YFP and WB is 20 genes and 25 siRNAs. Downstream studies focused on a panel of 5 kinase genes, selected for their druggability. In parallel, reporter cell lines expressing wt-CFTR, the DD/AA-CFTR mutant or genetic F508del-CFTR revertants affecting known ERQC checkpoints were used to screen the confirmation siRNA library, thereby allowing to classify the hit genes according to their dependence on different ERQC mechanisms. (B) Waterfall plot with Z-score5×5 for PM F508del-CFTR (median±SEM) obtained with all siRNAs analyzed in the primary screen and (C) inset showing the subset of 228 primary siRNAs which significantly increase PM F508del-CFTR. Dotted lines sow the thresholds for enhancer (Z-score5×5>+1) or inhibitor siRNA hits (Z-score5×5<−1). For most siRNAs n=3.

[0032] FIG. 2. Overview of the confirmation siRNA screen. (A) Waterfall plot displaying the ranked modified Z-scores describing PM localization of F508del-CFTR as a function of treatment with all siRNAs in the primary screen. Values are median±SEM. (B) Representative microscopy data from the confirmation screen hit genes. Microscopy images of controls and selected hit genes. Negl is a non-targeting siRNA. VX-809 (3 μM) was added to selected wells containing Negl to obtain a positive control for the screen. The loss of CFTR expression (mCherry) in CFTR siRNA-treated cells reports on a high transfection efficiency. Gene symbols and respective siRNAs catalogue numbers are shown. Scale bar: 50 μm. (C) Z-score for the PM and traffic efficiency quantification, shown as median±SEM. For most siRNAs n=3.

[0033] FIG. 3. Effect of hit siRNAs on F508del-CFTR processing assessed by WB. (A) CFBE cells overexpressing F508del-CFTR were transfected with siRNAs targeting 34 of the 35 confirmed hit genes (LDLRAD could not be included) and analyzed by WB for processing to confirm effects on traffic rescue. Wt-CFTR was included for reference. (A) CFTR detection in a WB membrane. wt-CFTR was included for reference. The immature, core glycosylated (band B) and processed, fully glycosylated (band C) forms of CFTR are shown. (B) Quantification of band C, normalized to the corresponding loading controls. ‘*’ indicates statistical significance from Negl-treated cells (p<0.05, one-way ANOVA followed by Dunnett's post-hoc test, n=3). 58 out of the 68 tested siRNAs showed significant band C rescue versus the control. Plot values are mean±SD.

[0034] FIG. 4. Measurements of HS-YFP fluorescence quenching for hit siRNAs. Plots show data on siRNAs which produced quenching rate enhancements above +1 Z-score units on cells expressing F508del-CFTR (*). For some genes, quenching rate enhancements were observed for 2 distinct siRNAs. The corresponding values for wt-CFTR are also indicated. Values are average of 4 assays for most siRNAs. VX-809 and VX-661 were assayed at 3 and 5 μM, respectively.

[0035] FIG. 5. Hierarchical clustering of the classification screen results. (A) Number of common hit genes for the several CFTR variants. (B) Simplified representation of the first panel, showing only hit kinases. (C) Hierarchical clustering of a subset of the classification screen results. The plot shows data for the 35 siRNAs which enhance F508del-CFTR PM localization. The x-axis represents CFTR variants and each line in the y-axis is a single siRNA. Values are the Z-score for PM localization. Data was clustered in the x and y axes, as shown by dendrograms. The rows dendrogram highlights the 7 clusters mentioned in the results description. (D) Co-occurrence of genes in the F508del-CFTR traffic screens (this study) and other CFTR-related datasets: F508del-CFTR interactome in HBE41o- cells (Pankow et al., 2015), F508del-CFTR interactome in CFBE 41o- cells (Canato et al., 2018; Reilly et al., 2017), genes whose silencing significantly rescued F508del-CFTR activity (Tomati et al., 2018), candidate modifier genes of CF lung disease (Dang et al., 2020), ENaC activating genes in A549 cells (Almaça et al., 2013) and protein secretion machinery in HeLa cells (Simpson et al., 2012). The outer track contains one tick mark for each gene in the dataset (gray). Inter-dataset comparisons were performed after converting the reported gene identifiers to Uniprot IDs (see Methods). During the conversion process, genes for which an updated Uniprot ID could not be found were discarded, explaining the discrepancy in the gene counts in the original publications and this figure. For this study, the gene tick marks represent the Z-score. the outer track represents the primary screen hits. The subset of 35 confirmed genes is represented in the inner track. Common genes are linked with arcs in the center of the plot. Common genes in published datasets are linked by thin gray arcs. Primary screen hits are linked by thin dark red arcs. Confirmation screen hits are kinked by thin bright red arcs. Hit kinase genes are linked by thick bright red arcs. The symbols of hit kinases as well as primary and confirmation screen hit genes are also written in red. The only instance where one of the hit kinases is reported in another study is GRK5, which is an ENaC activating gene.

[0036] FIG. 6. Additivity of hit kinase KD with CFTR correctors on F508del-CFTR processing rescue. CFBE cells stably expressing F508del-CFTR were transfected with Negl or siRNAs targeting STYK1, TPK1, DGKG, GRK5 or LRRK1 and incubated for 24 h with DMSO (vehicle), 3 μM VX-809 (A,B), 5 μM VX-661 (C,D) or VX-661 combined with 3 μM VX-445 (E,F). Representative WB membranes (A, C, E) and densitometric quantification of CFTR and C normalized to the calnexin loading control (B, D, F). ‘#’ indicates statistical significance from the corresponding DMSO control (p<0.05 in double-tailed unpaired t-test, n=3). Plot values are mean±SD.

[0037] FIG. 7. Quantification of the knock-down efficiency of hit kinases. CFBE cells stably expressing F508del-CFTR were treated with siRNAs targeting the 5 hit kinases, as performed for other figures, omitting the incubation of CFTR correctors. The abundance of the mRNA coding for each gene is shown, normalized for cells treated with the non-targeting Negl siRNA (mean±SD, n=3).

[0038] FIG. 8. Scheme of (R,Z)-3-((4-(2-Bromoacetamido)-3,5-dimethyl-1H-pyrrol-2-yl)-methylene)-2-oxo-N-(1-phenylethyl)indoline-5-carboxamide synthesis. i) (S)-1-phenylethan-1-amine, HATU, DIPEA, DMF, rt, overnight, 84%; ii) 3,5-dimethyl-4-nitro-1H-pyrrole-2-carbaldehyde, piperidine, EtOH, 95° C., 2 h, 87%; iii) zinc powder, AcOH, EtOAc, EtOH, 50 C, 2 h, 79%; iv) bromoacetic acid, HATU, DIPEA, DMF, rt, overnight, 55%.

[0039] FIG. 9. GRK5 inhibition with 9 g rescues F508del-CFTR traffic and function. (A) CFBE cells stably expressing F508del-CFTR were incubated with increasing doses of (R,Z)-3-((4-(2-Bromoacetamido)-3,5-dimethyl-1H-pyrrol-2-yl)-methylene)-2-oxo-N-(1-phenylethyl)indoline-5-carboxamide (9 g) or VX-661 3 μM and analyzed with Western blot. Densitometric quantification of band C (B) and CFTR processing [C/(B+C)](C). Statistically significant band C rescue is observed at 0.3 and 1.0 μM of (R,Z)-3-((4-(2-Bromoacetamido)-3,5-dimethyl-1H-pyrrol-2-yl)-methylene)-2-oxo-N-(1-phenylethyl)indoline-5-carboxamide (9 g). Processing is not significantly changed due to proportional increases in band B. Symbols indicate statistical significance from DMSO (“*”) or VX-661 (“#”) lanes (p<0.05, one-way ANOVA followed by Dunnett's post-hoc test, n=3). Plot values are mean±SD. (D) Additivity of (R, Z)-3-((4-(2-Bromoacetamido)-3,5-dimethyl-1H-pyrrol-2-yl)-methylene)-2-oxo-N-(1-phenylethyl)indoline-5-carboxamide (9 g) (1 μM) to CFTR correctors VX-661 (5 μM), VX-445 (3 μM) and VX-661+VX-445 and densitometric quantification of band C (E) and B (F). (R,Z)-3-((4-(2-Bromoacetamido)-3,5-dimethyl-1H-pyrrol-2-yl)-methylene)-2-oxo-N-(1-phenylethyl)indoline-5-carboxamide (9 g) is additive to all corrector treatments regarding bands C and B (#p<0.05 unpaired t-test, n=4). (G) halide-sensitive YFP quenching of CFBE cells expressing F508del-CFTR and incubated with (R,Z)-3-((4-(2-Bromoacetamido)-3,5-dimethyl-1H-pyrrol-2-yl)-methylene)-2-oxo-N-(1-phenylethyl)indoline-5-carboxamide (9 g) (1 μM) and/or VX-661 (5 μM), VX-445 (3 μM) and VX-661+VX-445. Iodide was added at the indicated time point to initiate quenching. (H) Quenching rate at the moment of iodide addition. (R,Z)-3-((4-(2-Bromoacetamido)-3,5-dimethyl-1H-pyrrol-2-yl)-methylene)-2-oxo-N-(1-phenylethyl)indoline-5-carboxamide (9 g) is additive to all corrector treatments regarding F508del-CFTR functional rescue (#p<0.05 double-tailed unpaired t-test, n=4). Plot values are mean±SD.

[0040] FIG. 10. Model for F508del-CFTR rescue via GRK5 inhibition. GRK5 is part of the machinery which activates CFTR endogenously, in response to β2-adrenergic receptor (β2AR) ligands such as epinephrine, isoprenaline or albuterol. Ligand binding is transduced intracellularly by the hetero-trimeric G proteins associated with β2AR, which activate adenylyl cyclase, the enzyme which converts ATP to cAMP. The cAMP pool activates CFTR by two distinct mechanisms: (i) activation of protein kinase A (PKA), which phosphorylates CFTR's R domain in an ATP-dependent manner as the first step in the gating cycle which opens the channel, and (ii) EPAC1-dependent stabilization of CFTR at the PM. Adenylyl cyclase can be artificially activated with forskolin (Fsk). The cAMP pool is depleted by phosphodiesterases (PDE), which can be inhibited with 3-Isobutyl-1-methylxanthine (IBMX). GRK5 phosphorylates activated β2AR, which then becomes substrate for R-arrestin and is endocytosed to interrupt receptor signaling. Endocytic vesicles are recycled to the PM to restore cell sensitization. GRK5 kinase activity is promoted by Ca2+-calmodulin (CaM). GRK5 inhibition with siRNAs or (R,Z)-3-((4-(2-Bromoacetamido)-3,5-dimethyl-1H-pyrrol-2-yl)-methylene)-2-oxo-N-(1-phenylethyl)indoline-5-carboxamide (9 g) releases F508del-CFTR from the ER, increases the steady state of CFTR at the PM and yields higher CFTR-dependent Cl⁻ conductance. The link between GRK5 and F508del-CFTR ER release is not completely clear but given that GRK5 is not a CFTR interactor and its inhibition is additive to VX-661 a direct GRK5-CFTR mechanism is unlikely. Since GRK5 is expressed ubiquitously, this pathway may be active on several cell types which express CFTR. Adapted from (Boccella et al., 2019; Traynham et al., 2016).

### DETAILED DESCRIPTION OF EMBODIMENTS

[0041] Now, preferred embodiments of the present application will be described in detail with reference to the annexed drawings. However, they are not intended to limit the scope of the invention.

[0042] The present invention relates to a method of identifying agents for the treatment of Cystic Fibrosis caused by the mutation F508del in the gene encoding the CFTR protein (F508del-CFTR), wherein a candidate agent contacts with at least one gene sequence selected from SEQ ID NOs: 228 to 478 or with at least one of its protein products of Seq.ID: 1 to 227 as therapeutic targets, and the ability of the candidate agent to modulate the activity of the F508del-CFTR protein and its plasma membrane traffic is determined.

[0043] The gene sequences SEQ ID NOs: 228 to 478 were identified by a high-throughput siRNA cell-based microscopy screen aimed at identifying gene KDs which enhance F508del-CFTR plasma membrane levels, as potential candidates for drug therapy in the treatment of Cystic Fibrosis. Of those, Seq.ID: 232, 237, 238, 250, 253, 257, 259, 263, 276, 285, 296, 297, 301, 317, 318, 319, 333, 338, 369, 378, 396, 401, 405, 409, 410, 411, 417, 420, 421, 430, 442, 450, 458, 459, 471, 472 and 478 were identified as the top hits for which KD enhances the PM localization of F508del-CFTR.

[0044] Five kinases (TPK1, LRRK1, STYK1, GRK5, DGKG, Seq. ID: 237, 238, 232, 396, 233 and 248 respectively), were identified as showing F508del-CFTR rescue in the microscopy or Western-Blot assays, and are now disclosed as potential drug targets for F508del-CFTR CF.

[0045] Activity modulation is affected by inhibiting gene expression of at least one gene sequence selected from Seq.ID: 228 to 478 or inhibiting their protein product's activity. Inhibition can be affected by reducing gene expression of at least one gene sequence selected from SEQ ID NOs: 228 to 478 or be affected by inhibition on the protein level.

[0046] The candidate agent must be suitable to inhibit the activity of at least one gene sequence selected from Seq.ID: 228 to 478 or their protein product by more than 20% relative to the activity in the absence of the candidate agent.

[0047] The capability of the candidate agent to bind to a protein product, or a domain thereof, from at least one gene sequence selected from SEQ ID NOs: 228 to 478 is determined.

[0048] In one embodiment (R,Z)-3-((4-(2-Bromoacetamido)-3,5-dimethyl-1H-pyrrol-2-yl)-methylene)-2-oxo-N-(1-phenylethyl)indoline-5-carboxamide is the candidate agent for the treatment of Cystic Fibrosis caused by the mutation F508del in the gene encoding the CFTR protein.

[0049] The candidate agent identified by the method herein disclosed is thus suitable for the treatment the treatment of Cystic Fibrosis caused by the mutation F508del in the gene encoding the CFTR protein.

[0050] Also disclosed in a pharmaceutical composition comprising an agent suitable to modulate F508del-CFTR activity and its plasma membrane traffic through at least one gene sequence selected from SEQ ID NOs: 228 to 478 or through their protein product as therapeutic targets.

[0051] In one embodiment, the pharmaceutical composition can further comprise at least one pharmaceutically acceptable diluent, carrier, adjuvant or excipient.

[0052] Cystic Fibrosis caused by the mutation F508del in the gene encoding the CFTR protein can be treated by using an effective amount of an agent that modulates the activity of F508del-CFTR protein and its plasma membrane traffic through at least one gene sequence selected from SEQ ID NOs: 228 to 478 or through their protein product as therapeutic targets.

### Experimental Data

[0053] In this application it is described a high-throughput siRNA cell-based microscopy screen aimed at identifying gene KDs which enhance F508del-CFTR PM levels. Screening a commercially available siRNA library targeting nearly half of the human genome, selecting hit genes (FIG. 1) and re-screening the hits with different siRNAs confirmed 35 genes (FIG. 2) whose KD enhances the PM localization of F508del-CFTR, which were termed top hits. This stringent criterion equates to a 15% hit validation rate, somewhat lower than the 30% usually reported (Almaça et al., 2013; Neumann et al., 2010; Simpson et al., 2012). However, this can be explained by several reasons (low siRNA efficiency/specificity) and does not necessarily imply that for hits identified in the primary screen which were not confirmed in secondary screen a role on F508del-CFTR traffic is excluded.

[0054] To ascertain the validity of these top hit genes as novel therapeutic targets for CF gene KDs were performed while assessing F508del-CFTR processing by WB (FIG. 3), as well as functional rescue of CFTR-mediated anion conductance using the HS-YFP fluorescence quenching assay (FIG. 4). It was found that KD of 21 of these top hits also rescued F508del-CFTR function. The WB-based validation pinpointed 50 hit KDs (32 of the 35 confirmed genes and 18 additional genes targeted by sub-optimally scoring siRNAs in the secondary screen) as significantly rescuing F508del-CFTR band C, the fully glycosylated CFTR form characteristically found in the PM (FIG. 3). Expression of most of these genes in lung tissue was confirmed with RT-PCR. CFTR variants which are sensitive or resistant to ERQC checkpoints had mixed effects regarding CFTR rescue additivity when hit gene KDs were performed (FIG. 5 A-C).

[0055] We noticed that among the 50 gene KDs which shown F508del-CFTR rescue in the microscopy or WB assays there were 5 kinases (TPK1, LRRK1, STYK1, GRK5, DGKG), which were selected for additional validation not only because of their amenability to pharmacological modulation but because their KD was among the conditions generating the highest F508del-CFTR band C rescue. Additionally, by analyzing a selected set of CF or CFTR-related gene datasets (FIG. 5D) it was surmised that the kinases could be novel CFTR regulators given that there was only one report of one of the kinases in the scanned datasets: GRK5 KD was also found to inhibit ENaC. This phenotype is desirable in the clinic because the loss of Cl⁻ secretion via CFTR due to CF-causing mutations is accompanied by Na⁺ hyperabsorption via ENaC, which exacerbates airway dehydration.

[0056] To ascertain the potential biomedical relevance of inhibiting these kinases to achieve F508del-CFTR rescue WB and patch clamp assays were performed in combination with treatment with clinical CFTR correctors: VX-809, VX-661 and VX-661 plus VX-445. In WB all KDs were additive with at least 1 corrector treatment, suggesting an independent MoA (FIG. 6). It was also noted that some of the kinase KDs (e.g. GRK5) could share the MoA of VX-445, due to deleterious effects on combining the KD with corrector treatment. RT-PCR analysis revealed that in these experiments mRNA levels for the 5 kinases were reduced between 22 and 60% (FIG. 7). The hit kinases were not hits in similar siRNA-based screens examining F508del-CFTR functional rescue when targeting the druggable genome (Tomati et al., 2018) or kinome (Perkins et al., 2018) (FIG. 5D).

[0057] Altogether, the data pointed to GRK5 as a therapeutically relevant potential new F508del-CFTR regulator gene, not only for the relevant rescue when knocking down the gene, but also for the indications on its MoA. To validate GRK5 as a potential novel therapeutic target for CF the enzyme was inhibited with a recently published selective and covalent inhibitor: (R,Z)-3-((4-(2-Bromoacetamido)-3,5-dimethyl-1H-pyrrol-2-yl)-methylene)-2-oxo-N-(1-phenylethyl)indoline-5-carboxamide (Rowlands et al., 2021, FIG. 8). Low micromolar concentrations of this compound achieved significant F508del-CFTR processing and function rescue, which was additive to VX-809, VX-445 and VX-661 (FIG. 9), suggesting a potential added benefit.

[0058] It was hypothesized that the GRK5 inhibition could yield F508del-CFTR rescue through the well-established pathway of endogenous CFTR activation through the beta2-adrenergic receptor (β2AR) (Boccella et al., 2019; Traynham et al., 2016) (FIG. 10). β2AR is a G-protein coupled receptor and binding of extracellular β2AR agonists (epinephrine, amlexanox) is transduced intracellularly through trimeric G proteins, which activate adenylyl cyclase, the enzyme which converts ATP into cyclic AMP (cAMP). cAMP contributes to functionally activate CFTR through two independent pathways: activation of protein kinase A (PKA) which phosphorylates CFTR's R domain as the first step in channel gating; and EPAC1-dependent stabilization at the PM. Adenylyl cyclase can be artificially activated with forskolin and the cAMP pool can be depleted by phosphodiesterases (PDE), which are inhibited by IBMX. GRK5 is recruited by the G proteins to phosphorylate β2AR. This determines β2AR endocytosis through β-arrestins, which terminates the signal. Eventually, β2AR is recycled to the PM to restore cell sensitization. Endogenously, GRK5 is activated by interaction with Ca²⁺-calmodulin (CaM), a process which can be inhibited with malbrancheamide. It is not clear how GRK5 inhibition releases F508del-CFTR from the ER, but available CFTR interactomes seem to rule out a direct GRK5-CFTR interaction. It is also not clear whether the possible impact on the cellular cAMP pool may be part of the MoA. The contribution of calmodulin was not assessed because that would be a target more upstream than GRK5.

[0059] GRK5 as well as the closely related GRK2 are ubiquitously expressed. Most preclinical research on these proteins relates to their role in cardiac hypertrophy associated to heart failure. Until recently, there were no specific GRK5 inhibitors. CCG215022 is a well-known pan GRK inhibitor with similar IC50 for GRK2, 5 and 1: 0.15±0.07 μM, 0.38±0.06 μM and 3.9±1 μM, respectively. It does not affect GRK1 or PKA but lacks overall specificity (Homan et al., 2015). (R, Z)-3-((4-(2-Bromoacetamido)-3,5-dimethyl-1H-pyrrol-2-yl)-methylene)-2-oxo-N-(1-phenylethyl)indoline-5-carboxamide is the first GRK5-specific inhibitor (IC50=8.6 nM and covalent binding) with 1400-fold selectivity against GRK2 (Rowlands et al., 2021). Out data suggests that (R,Z)-3-((4-(2-Bromoacetamido)-3,5-dimethyl-1H-pyrrol-2-yl)-methylene)-2-oxo-N-(1-phenylethyl)indoline-5-carboxamide could hold therapeutic relevance in CF, by rescuing F508del-CFTR in a manner additive to current folding correctors. The low micromolar range where F508del-CFTR rescue was observed on cellular models is comparable to the working concentration of CFTR clinical correctors on the same systems, suggesting a relevant potency. Finally, the work suggests that the preclinical relevance of (R,Z)-3-((4-(2-Bromoacetamido)-3,5-dimethyl-1H-pyrrol-2-yl)-methylene)-2-oxo-N-(1-phenylethyl)indoline-5-carboxamide should be evaluated in cellular and animal models with the goal of establishing an improved CF therapy in combination with current clinical drugs.

[0060] The results point to GRK5 as a putative novel therapeutic target for Cystic Fibrosis, which can be inhibited with the selective inhibitor (R,Z)-3-((4-(2-Bromoacetamido)-3,5-dimethyl-1H-pyrrol-2-yl)-methylene)-2-oxo-N-(1-phenylethyl)indoline-5-carboxamide. This compound holds the potential to become a new and improved CF therapy, to be combined with current CFTR-targeting clinical drugs.

### Examples

### 1. Methods

### CFTR Constructs and Cell Lines

[0061] Cell transfection was performed with a reverse transfection protocol (Erfle et al., 2007), whereby assay plates are coated with a lyophilized mixture of siRNA plus transfection reagent before cells are seeded. Contact time with the siRNA—i.e. transfection time—was 72 h. Expression of the traffic reporter was induced with doxycycline during the last 48 h of the assay. This setup, where the traffic reporter is expressed in a cellular milieu depleted for the siRNA target gene was selected so as to increase the assay sensitivity for factors regulating CFTR biogenesis. Imaging was performed with a widefield fluorescence microscope, which allows detecting all cellular fluorescence in a single image. The library was laid out on microscopy-grade 384 well plates, where each well contained only one siRNA molecule. The coating procedure failed in 8 of the plates, which could not be used for screening. The screening data was subjected to a quality control process which filtered out the following cases: (i) siRNAs which were suspect of targeting no protein-coding genes or simultaneously targeting multiple targets (see methods); (ii) cells which did not express significant CFTR amounts; (iii) out-of-focus images; and (iv) wells with a low cell count.

[0062] CFTR traffic reporters were built by fusing mCherry N-terminally to the CFTR molecule via a small linker (QISSSSFEFCSRRYRGPT) and by inserting a Flag tag sequence (DYKDDDDK) in the fourth extracellular loop of CFTR, as described elsewhere (Almaça et al., 2011; Botelho et al., 2015). CFBE cells (CFBE41o-) were stably transduced with lentivirus encoding the mCherry-Flag-CFTR constructs under the control of a Tet-ON promoter, thereby generating traffic reporter cell lines. Traffic reporters were generated for several CFTR variants: wt- and F508del-CFTR (reported in (Botelho et al., 2015)), variants containing F508del revertant mutations F508del-4RK (R29K, R516K, R555K, R766K), F508del-R1070W-CFTR, F508del-G550E-CFTR, as well as the DD/AA-CFTR mutant (Canato et al., 2018). Reporter cell lines were grown in Dulbecco's Modified Eagle's Medium (DMEM) containing 4.5 g/L Glucose and L-Glutamine (Lonza, #12-604F) supplemented with 10% (v/v) foetal bovine serum (FBS, Gibco #10106), 2 μg/ml puromycin (Sigma, #P8833) and 10 μg/ml Blasticidin (InvivoGen, #ant-bl) at 37° C. in 5% CO₂.

[0063] CFBE41o- cells constitutively co-expressing the HS-yellow fluorescent protein (HS-YFP) YFP-H148Q/I152L as well as wt- or F508del-CFTR (described in (Sondo et al., 2011)) were a kind gift from Dr Nicoletta Pedemonte (IRCCS Istituto G. Gaslini, Genoa, Italy). These cells were cultured in Minimum Essential Medium (MEM) supplemented with 10% FBS, 2 mM L-glutamine, puromycin 2 μg/ml and G418 200 μM (Sigma, #A1720) at 37° C. in 5% CO₂.

[0064] CFBE41o- cells constitutively expressing wt- or F508del-CFTR were grown in DMEM supplemented with 10% FBS, at 37° C. in 5% CO₂.

### Chemistry General Remarks

[0065] All solvents were purchased from commercial sources and were dried according to standard methods. All chemicals and starting materials (2-oxoindoline-5-carboxylic acid, (S)-1-phenylethan-1-amine, HATU, 3,5-dimethyl-4-nitro-1H-pyrrole-2-carbaldehyde, bromoacetic acid, DIPEA, piperidine and zinc powder) were purchased from Fluorochem and Sigma-Aldrich. Reactions were monitored by TLC using 0.25 mm silica gel 60 F254 TLC plates purchased from Merck. Spots were visualized under ultraviolet light (254 nm).

[0066] 1H, 13C APT NMR spectra were acquired on a Bruker Avance 400 spectrometer equipped with a 5 mm QNP probe operating at 400.16 MHz and 100.61 MHz for 1H and 13C respectively, at 293K. Spectra of all compounds were recorded using DMSO-d6 (99.9%; EurIsotop, UK). Spectroscopic data of all compounds was matched with the one previously reported (Rowlands et al., 2021). High-Resolution-mass spectra (HR-MS) and low-resolution mass spectra (MS) spectra were performed on an Impact II QTOF (Bruker, Bremen, Germany) mass spectrometer with an electrospray ionization source (ESI). The method consisted of direct infusions with MS/MS scans, in the positive and negative modes

### Synthetic Procedure

[0067] (R,Z)-3-((4-(2-Bromoacetamido)-3,5-dimethyl-1H-pyrrol-2-yl)-methylene)-2-oxo-N-(1-phenylethyl)indoline-5-carboxamide (5) was synthesized employing slight modifications of the Rowlands et al. method (Rowlands et al., 2021). In the second step, reaction time was cut in half and the yield increased to 87%. In the last step of the synthesis, the reported coupling agent was DMTMM with a yield of 39%, while HATU was used which afforded the final compound (5) in 55% yield (FIG. 8).

### CFTR Traffic Assay: Primary Screen

[0068] To establish an assay compatible with siRNA-based gene KD and small molecule treatments, a total experiment time of 72 h was selected, a consensus time in other studies (Dalemans et al., 1991; Pedemonte et al., 2011). In the primary screen CFTR intracellular localization was assessed in CFBE cells expressing the inducible mCherry-Flag-F508del-CFTR traffic reporter and subjected to siRNA KDs. To maximize transfection efficiency, cells were split 24 h before the start of the experiment to synchronize them in exponential growing phase. The experiment was initiated by seeding cells in microscopy-grade multi-well plates (384 wells) where each well was coated with a lyophilized mixture of an individual siRNA and a transfection reagent (see siRNA libraries below). Each well was seeded with 2,500 cells using a peristaltic pump (ThermoFisher Multidrop™ Combi). Antibiotics were removed at this stage. Expression of the mCherry-Flag-F508del-CFTR construct was induced with 1 μg/ml doxycycline (Dox, Sigma, #9891) starting at 24 h after seeding and continuing for 48 h, to allow for the 72 h siRNA contact time described above. This induction period allowed for sufficient construct expression, as measured by mCherry fluorescence. To obtain a positive control, wells containing a non-targeting siRNA (Scrambled) were induced in the presence of 3 μM VX-809 (Selleckchem #S1565) and a lower amount of FBS in the culture medium (0.1%).

[0069] After the 72 h assay time, cells undergo an immunofluorescence protocol to detect extracellular Flag tags in non-permeabilized cells, as described in (Amaral et al., 2016; Botelho et al., 2015). Briefly, cells are washed once in ice cold PBS supplemented with 0.7 mM CaCl₂ and 1.1 mM MgCl₂ (PBS⁺⁺), incubated 1 h with an anti-Flag antibody (1:500, Sigma #F1804), washed three times with ice cold PBS⁺⁺, incubated 20 min with 3% paraformaldehyde (PFA), washed three times with room temperature PBS⁺⁺, incubated 1 h with an anti-mouse Alexa Fluor 647 conjugated secondary antibody (1:500, Life Technologies #A31571), washed three times with PBS⁺⁺, incubated with Hoechst 33342 (200 ng/ml, Sigma #B2261) for 1 to 6 hours, washed with PBS⁺⁺ and stored at 4° C. until imaging. Antibodies are solubilized in PBS⁺⁺ containing 1% bovine serum albumin (BSA, Aldrich #A9647). PFA and Hoechst are solubilized in PBS⁺⁺.

### CFTR Traffic Assay: Secondary Screen

[0070] To confirm the siRNA hits found to significantly enhance F508del-CFTR traffic in the primary screen (primary screen hits), a secondary screen was performed. The 227 primary screen hit genes were re-screened with 2 additional siRNAs using the traffic assay described for the primary screen and CFBE cells expressing the mCherry-Flag-F508del-CFTR reporter. The siRNAs were selected so as to have improved stability and specificity (Silencer Select siRNAs, Ambion) and different sequences than the ones in the primary screen.

### CFTR Traffic Assay: ERQC Checkpoints Classification Screen

[0071] Classification of the primary screen hits in terms of their effect on the ERQC checkpoints which retain F508del-CFTR was pursued by re-screening the primary screen hits using the reporter cell lines expressing wt-CFTR, F508del-CFTR genetic revertants (4RK, G550E or R1070W) as well as the DD/AA variant.

siRNA Libraries

[0072] The CFTR traffic assays used Ambion siRNAs and transfection reagents. For the primary screen Ambion's Silencer Human Extended Druggable Silencer siRNA library was used. All siRNA sequences from this library were blasted against the transcriptomic data in Ensembl version 78, to reassign the gene target of each siRNA. Only siRNA molecules targeting a single protein-coding gene were considered for screening. The hits from the primary screen were re-screened with a cherry-picked library composed of Ambion Silencer Select siRNAs (2 siRNAs per gene target). Lipofectamine 2000 was used as a transfection reagent. In both cases, the microscopy plates were coated with a siRNA plus transfection reagent mixture and lyophilized (Botelho et al., 2015). At this point, plates were stored at room temperature in airtight boxes containing desiccating pearls. For the traffic assay, transfection was triggered by cell seeding (reverse transfection, as described in (Erfle et al., 2007)). At the moment of CFTR induction the siRNA target gene is—at least partially—absent.

[0073] Validation assays (WB and HS-YFP quenching) were performed with a cherry-picked siRNA library of Ambion Silencer Select siRNAs, where each of the 35 confirmed hits were targeted by the same 2 siRNAs used in the confirmation step.

### Image Acquisition

[0074] Automated cell imaging was performed at room temperature with a Leica DMI6000 B inverted epifluorescence microscope equipped with a metal halide light source (EL6000), a 10× NA 0.40 HC PL APO objective, a Hamamatsu Orca-Flash4.0 CMOS camera and filter cubes suitable for imaging the fluorophores used in the traffic assay: Hoechst 33342 (model A, Leica Microsystems: excitation: BP 340-380; dichroic mirror 400; emission filter LP 425), mCherry (model N2.1, Leica Microsystems: excitation BP 515-560; dichroic mirror 580; emission LP 590) and Alexa Fluor 647 (custom: excitation: BP 630-660; emission LP 670). Image acquisition was performed with the microscope being controlled by the Leica MatrixScreener software, which managed the software autofocus, multiposition imaging of each well (4 subpositions per well) and imaging of the three fluorophores. Images were stored as 16 bit OME TIF files.

### Image Analysis

[0075] Image quantification was performed with CellProfiler (Carpenter et al., 2006) using an analysis pipeline which performed background subtraction, cell segmentation, fluorescence integration and basic quality control (exclusion of cells undergoing mitosis, apoptosis or containing a significant number of saturated pixels). Background subtraction was performed using a dark field/flat frame algorithm using experimental (secondary and classification screens) or simulated (primary screen) correction images. Cell phenotype was assessed from three image features, extracted from each cell: the integrated mCherry fluorescence signal (which reports on total CFTR expression), the integrated Alexa Fluor 647 fluorescence signal (which reports on the amount of CFTR molecules inserted into the PM) and the ratio of the integrated fluorescence signals from Alexa Fluor 647 and mCherry (A647/mCherry, which reports on CFTR traffic efficiency). Screen hits were defined based on the quantification of the PM signal. The confirmation and classification library plates contained 5-8 wells with an siRNA targeting CFTR, as a transfection control. Only the plates where mCherry fluorescence was lost (i.e. abrogation of CFTR expression) in the majority of cells were scored.

### Data Analysis—Primary Screen

[0076] To score the CFTR traffic phenotype generated by each siRNA a statistical analysis algorithm was devised which takes into consideration the experimental context where the data was originally produced: i) multi-well plates (384 well); ii) each well corresponds to one siRNA treatment; iii) the same siRNA may occur at one or more wells in the same plate; iv) some wells correspond to controls (e.g. positive, negative or transfection controls); v) each well is imaged at 4 non-overlapping positions; vi) each imaging field encompasses multiple cells; vii) there are fluorescence measurements for each cell; viii) there are independent biological replicate experiments for each plate.

[0077] The statistical analysis algorithm takes as input image-based features (e.g. metadata, focus score, background fluorescence) and cell-based features (e.g. the image they belong to, metadata, fluorescence intensities, traffic efficiency ratio) generated by image analysis with CellProfiler and computes a modified Z-score for the PM fluorescence intensity and traffic efficiency ratio produced by each siRNA. The algorithm has been implemented in the R programming language and has the following steps: i) Import image and cell features; ii) Quality Control: exclude all data from unapproved plates (bad sample preparation), wells (wells with less than 100 cells), images (out-of-focus or high background images) and cells (aberrant morphology or fluorescence saturation); iii) Well Summary: take the PM fluorescence intensity and traffic efficiency values for all cells in a well and compute their respective medians; iv) Normalization: convert each well summary value into a score. Due to the lack of reliable non-targeting siRNAs in the primary screen library, the negative control measurements for each well were provided by neighbouring ones, as defined by a 5×5 matrix centered at the target well. For external wells, which do not have 24 neighbours, missing values were dropped. Therefore, primary screen data was normalized with a modified Z-score defined by:

$$Modified Z - score = \frac{x - Median ( {Neighbors}_{5 \times 5 , {plate}_{i}} )}{sd ( {Neighbors}_{5 \times 5 , {plate}_{i}} )}$$

where x is the well summary value, sd is the standard deviation and Neighbors_{5×5, plate}_{ᵢ} is the ensemble of negative control values; v) Plate summary: compute the median of the normalized PM staining and traffic efficiency values for all wells which have the same siRNA treatment in the same plate; vi) Treatment summary: take the plate summary values and compute their median across replicate plates. The median-summarized values are the ones reported herein.

### Data Analysis—Confirmation and Classification Screens

[0078] In the confirmation and classification siRNA libraries 10 to 18 wells in each 384 well plate contained a bona fide non-targeting siRNA (Negl), which was used as a negative control. For these results a standard Z-score was computed through the following algorithm (Botelho et al., 2015): i) Quality Control: exclude all data from unapproved plates (low transfection efficiency in wells containing CFTR siRNA, bad sample preparation), wells (wells with less than 100 cells), images (out-of-focus or high background images) and cells (aberrant morphology or fluorescence saturation); ii) Well Summary: take the PM fluorescence intensity and traffic efficiency values for all cells in a well and compute their respective medians; iii) Normalization: convert each well summary value into a Z-score, using the average and standard deviation of wells containing the non-targeting Negl siRNA; iv) Plate summary: compute the median of the normalized PM staining and traffic efficiency values for all wells which have the same siRNA treatment in the same plate; v) Treatment summary: take the plate summary values and compute their median across replicate plates; vi) The median-summarized values are the ones reported herein.

### Measurements of Halide-Sensitive (HS-)YFP Fluorescence Quenching

[0079] This assay was used to assess whether the enhanced F508del-CFTR traffic recorded when the reporter cell line was transfected with confirmed hit siRNAs also corresponded to enhanced F508del-CFTR ionic transport function. As in the microscopy-based screens, a 72 h siRNA transfection time was selected. The assay followed a previously reported protocol (Sondo et al., 2011). CFBE cells co-expressing HS-YFP and wt- or F508del-CFTR were grown to confluency (37° C., 5% CO₂) and split to 50% confluency. On the following day, the experiment was initiated by seeding cells onto siRNA-coated 96 well plates using a peristaltic pump (ThermoFisher Multidrop™ Combi). Each well was seeded with 10,000 cells. Antibiotic-free medium was used. 48 h after seeding, positive controls were generated by adding the CFTR correctors VX-809 (3 μM) or VX-661 (5 μM, Selleckchem #S7059) to selected wells containing the non-targeting Negl siRNA. Serum concentration in these wells was reduced to 0.1%, 72 h after seeding, cells were washed two times with PBS (containing 137 mM NaCl, 2.7 mM KCl, 8.1 mM Na₂HPO₄, 1.5 mM KH₂PO₄, 1 mM CaCl₂, and 0.5 mM MgCl₂) and stimulated for 30 min with PBS containing Forskolin (20 μM, Sigma #F6886) and VX-770 (3 μM, Selleckchem #S1144) at 37° C. in the absence of CO₂. Each well was added 60 μl of the stimulation solution. After the stimulation period, each plate was transferred to a fluorescence plate reader equipped with fast reagent injectors (Tecan Infinite F200 Pro) and excitation (BP 475-495 nm) and emission (BP 523-458 nm) filters suitable for YFP fluorescence. Each assay consisted of a continuous 16 s fluorescence reading with 2 s before and 14 s after injection of 160 μl of a PBS where Cl⁻ had been replaced by I⁻ (final I⁻ concentration in the well: 100 mM). The pH of all PBS-containing solutions was rigorously set at pH 7.4 immediately before use to avoid artifacts in the fluorescence reading. The resulting kinetics was background subtracted and normalized to the pre-injection fluorescence value. To determine the fluorescence quenching rate associated with I⁻ influx, the final 14 s of the kinetics in each well were fitted with a single decay exponential curve and the derivative at the injection time (i.e. the quenching rate) was extracted from the curve parameters. To make the data comparable to the microscopy scoring the negative of the quenching rate was taken and converted it to a Z-score or to a fold change versus the negative control. This transformation has the advantage that positive Z-scores report on the KDs which activate F508del-CFTR above the negative control.

### Western Blotting (WB)

[0080] WB analyses were used as a readout for CFTR processing (and ER exit) to confirm the effect of gene KDs on CFTR PM levels, and to examine the additivity of gene KDs with modulation with folding corrector. The assay used CFBE cells constitutively expressing wt-, F508del-, F508del-G550E-, F508del-R1070W-, F508del-4RK-, DD/AA-, G85E- or N1303K-CFTR. Confluent cell cultures were split to 50% confluency, to stimulate cell proliferation. 24 h later, cells were seeded into 12-well plates which had been coated with siRNAs for reverse transfection (87,500 cells/well). Each plate included a non-targeting Negl siRNA as negative control and a CFTR targeting siRNA as transfection control. Cells were grown for 48 h in the presence of siRNAs. When required, VX-809 (3 μM), VX-661 (5 μM) or VX-445 (3 μM, in combination with VX-661) were added in the last 24 h of siRNA contact, along with matching DMSO controls.

[0081] WB samples were prepared by lysing transfected cells with Laemmli sample buffer. The buffer contained no bromophenol and was supplemented with a protease inhibitor cocktail (Roche, Complete: one tablet per ml), benzonase and magnesium chloride. Cells were scrapped manually at 4° C. and lysates were stored at −20° C. until analysis.

[0082] Following quantification, the same protein amount of each lysate was loaded on SDS-PAGE gels (7.5% or 10%), electrophoresed, blotted and probed with the following antibodies: anti-CFTR (CFFT 596, 1:1000-1:3000), or anti-Calnexin (1:3000) the latter as loading control. The membranes were developed with a luminescent enzymatic reaction. wt-CFTR samples were loaded at lower concentration in order to allow proper visualization of the much more abundant CFTR bands.

[0083] Images were quantified with Bio-Rad's Image Lab software, with local background subtraction. The quantification of each band was transformed to the fold change versus the loading control band. To compare across bands, results were reported as fold change versus F508del-CFTR-expressing cells transfected with the Negl siRNA in the absence of correctors.

### Patch-Clamp

[0084] The F508del-CFTR chloride conductance was investigated in CFBE cells overexpressing F508del-CFTR and transfected with the following Ambion Silencer Select siRNAs against selected hit genes: siDGKG (#s3918), siGRK5 (#s6087), siLRRK1 (#s36138), STYK1 (#s30824) and siTPK1 (#s25692). siRNA selection was based on WB experiments: each gene was knocked-down with two distinct siRNAs and the one producing the largest F508del-CFTR rescue was selected. The negative control siRNA was Negl.

[0085] Cells grown on cover slips were mounted in a perfused bath on the stage of an inverted microscope (IM35, Zeiss) and kept at 37° C. The bath was perfused continuously with Ringer solution (mM: NaCl 145, KH₂PO₄ 0.4, K₂HPO₄ 1.6, D-glucose 5, MgCl₂ 1, Ca-gluconate 1.3, pH 7.4) containing 50 nM TRAM-34 at about 8 ml/min. Patch-clamp experiments were performed in the fast whole-cell configuration. Patch pipettes had an input resistance of 2-4 MΩ, and whole cell currents were corrected for serial resistance. Patch pipettes were filled with an intracellular like solution containing (mM) KCl 30, K-gluconate 95, NaH₂PO₄ 1.2, Na₂HPO₄ 4.8, EGTA 1, Ca-gluconate 0.758, MgCl₂ 1.034, D-glucose 5, ATP 3. pH was 7.2, the Ca²⁺ activity was 0.1 μM. Currents were recorded using a patch clamp amplifier (EPC 7, List Medical Electronics, Darmstadt, Germany), the LIH1600 interface and PULSE software (HEKA, Lambrecht, Germany) as well as Chart software (AD Instruments, Spechbach, Germany). In regular intervals, membrane voltages (Vc) were clamped in steps of 20 mV from −100 to +100 mV from holding potential of −100 mV. CFTR was stimulated with 25 μM Genistein and 2 μM Forskolin (Gen/Fsk). Current density was calculated by dividing whole-cell currents by cell capacitance.

### Quantitative RT-PCR

[0086] For the analysis of the 35+18 traffic regulator genes the source material was lung tissue or CFBE cells expressing wt-CFTR. The quantification of the knock-down efficiency of the 5 hit kinases used CFBE cells expressing F508del and grown as established for WB, but without CFTR corrector incubation. RNA was extracted (Trizol method—Invitrogen—or Macherey Nagel Nucleospin columns), digested with DNase I and quantified by Nanodrop spectrophotometry. Approximately 1 μg of total RNA was subjected to reverse transcription (RT) with random primers to produce cDNA (NZYTech, Lisboa, Portugal). cDNA was diluted to give a final reaction mixture concentration between 0.5 and 1.5 ng/μL. Each gene transcript was amplified in separate reactions by qRT-PCR using the SsoFast EvaGreen system (Bio-Rad, Hercules, CA), with primer sequences obtained from the Harvard primerbank or custom designed. Melt curves were checked to confirm amplification of single products, and negative controls were confirmed to be free of nonspecific amplification at 40 cycles. Products were quantified using the ΔΔCT method, normalized using as a reference gene either CAP-1 (adenylate cyclase associated protein 1) or ACTB (B actin). The correct size of amplification products was verified by agarose gel electrophoresis.

### Forskolin-Induced Swelling

[0087] Forskolin-induced swelling (FIS) assay was adapted from (Dekkers et al., 2013). Briefly, rectal organoids were seeded in a flat-bottom 96-well culture plate in 4 μL of matrigel and immersed in 50 μL of culture medium, with or without shRNA (see below) or 3 μM VX-809 (lumacaftor). After 24 h, the organoids were incubated with 3 μM calcein green (Invitrogen, USA) for 20 min and before the imaging stimulated with different concentrations of forskolin (0.02, 0.128, 0.8 and 5 μM) (Sigma-Aldrich, USA) alone or in combination with 3 μM VX-770 (ivacaftor, Selleckchem, USA). The organoids were directly analysed by confocal live cell microscopy (Leica DMI 6000B, Leica Microsystems, Germany) at 37° C. with 5% CO₂ for 60 min and images were acquired every 10 min. Organoid FIS was quantified using Cell Profiler software (Broad Institute's Imaging Platform, USA) and using image processing and in-house designed scripts (Hagemeijer et al., 2020). GraphPad Prism was used to obtain and plot values for organoid surface area. Organoid FIS is expressed as the absolute area under the curve (AUC) calculated from the normalized surface are increase (baseline=100%, t=60 min). Quantification of CFTR response to shRNAs in organoids was calculated by the difference between non-treated (Fsk) and shRNA-treated. The responses were considered as positive when the AUC was above 1000 after shRNA incubation, as described in (Dekkers et al., 2013). Each experiment was performed at least three times and each condition had technical duplicates within the same experiment.

[0088] For lentiviral transduction of human rectal organoids, lentiviral particles containing shRNAs (MISSION® shRNAs from Sigma-Aldrich) targeting the genes of interest were produced in HEK 293T. Briefly, HEK cells were transfected with 5 μg of DNA per well of a 6-well plate—2.38 μg of packaging plasmid pCMV-dR8.74psPAX2, 0.24 μg of envelop plasmid VSV-G/pMD2.G, and 2.38 μg of the vector containing the shRNA—and incubated for 18 h at 37° C., 5% CO2. The medium was replaced, and cells were incubated for 30 h at 37° C., 5% CO₂. Lentiviral particles were concentrated immediately after harvesting using the PEG-it virus precipitation solution (System Biosciences, LV810A-1). PEG-it was added to the collected medium, incubated overnight at 4° C., and afterwards centrifuged at 1500 g for 30 min. Concentrated lentiviral particles were then added to organoids split into single cells, and plates were centrifuged at 200 g for 1 h at 25° C. (spinoculation). Cells were then incubated for 6 h at 37° C., 5% CO₂. Finally, stably transduced organoids were pelleted and grown in Matrigel for expansion.

### Bioinformatic Analyses

[0089] The scores from different CFTR variants obtained at the ERQC classification screen were compared with a heatmap coupled to hierarchical clustering, using a custom R script relying on the d3heatmap package. Data was kept in the Z-score scale and was not further normalized. When building the heatmap an outlier data point (Z-score˜36) was disregarded as it biased the clustering and data visualization.

[0090] Gene ontology annotation was performed using the statistical overrepresentation test, with Bonferroni correction, available on Panther (Thomas et al., 2003). In all cases the complete term database was used. Alternatively, gene functional annotations (Gene Ontology and Reactome) were performed through the David bioinformatics resource version 6.8 (Huang da et al., 2009), also using the Bonferroni p-value correction.

Intersections of Current Data with Other CFTR-Related Datasets

[0091] The interactome processing is available online at https://github.com/hmbotelho/CFTR_interactomes

[0092] The following datasets were considered: the primary and confirmed hit genes enhancing F508del-CFTR traffic (this study), F508del-CFTR interactome in HBE41o- cells (Pankow et al., 2015), F508del-CFTR interactome in CFBE 41o- cells (Canato et al., 2018; Reilly et al., 2017), genes whose silencing significantly rescued F508del-CFTR activity (Tomati et al., 2018), candidate modifier genes of CF lung disease (Dang et al., 2020), ENaC activating genes in A549 cells (Almaça et al., 2013) and protein secretion machinery in HeLa cells (Simpson et al., 2012).

### 2. Results

### Identification of Global F508del-CFTR Traffic Regulator Genes Through High-Content Screening

[0093] In order to identify genes which increase F508del-CFTR PM levels when knocked-down an established HT fluorescence microscopy pipeline was deployed based on a Tet-inducible F508del-CFTR traffic reporter (mCherry-Flag-F508del-CFTR) stably expressed in human airway cells (Botelho et al., 2015). An N-terminus mCherry fusion provides a means of quantifying CFTR protein expression in individual cells after reverse siRNA transfection and the extracellular Flag-tag enables the detection of CFTR molecules at the PM by an anti-Flag antibody (Ab) without cell permeabilization (Botelho et al., 2015). CFTR traffic efficiency can also be quantified through the Flag/mCherry fluorescence ratio. This pipeline was used to screen the Ambion Extended Druggable Genome siRNA library (27,312 siRNAs targeting 9,128 human genes, FIG. 1A). After filtering out siRNAs with multiple or non-protein coding targets, plates with unsuccessful siRNA coating and non-representative cells (see Methods) were able to score 21,846 siRNAs, targeting 8,592 genes, regarding the F508del-CFTR traffic phenotype (FIG. 1A). In the primary screen a significant enhancement of F508del-CFTR PM levels was detected for 228 siRNAs, targeting 227 genes (Z-score5×5≥+2) (FIG. 1B,C). Only 1 gene had 2 distinct siRNAs leading to F508del-CFTR PM rescue, which was UQCRFS1 (ubiquinol-cytochrome c reductase, Rieske iron-sulfur polypeptide 1). Conversely, the primary screen also revealed that 92 siRNAs (targeting 91 genes) leading to even significantly lower levels of PM F508del-CFTR (modified Z-score≤−2). Although the HT screening pipeline (Botelho et al., 2015) also scores CFTR traffic efficiency (the anti-Flag/mCherry ratio) in each siRNA treatment, here CFTR PM levels were taken as the primary criteria for hit selection, to maximize the probability of identifying genes also leading to increased overall CFTR activity. Anyway, in the primary screen, PM levels and traffic efficiency ratios were highly correlated (R²=0.87, p<2.2×10⁻¹⁶).

[0094] To gain insight on the nature of primary screen hits, overrepresentation tests were performed on the Gene Ontology (GO) terms associated with the positive hit genes, i.e., siRNAs enhancing F508del-CFTR traffic the same analysis was also performed with the negative hit genes. Considering the genes targeted by enhancer siRNAs, an overrepresentation of genes associated with the PM (cell component), kinase activity, ionic binding and transport and adenylyl nucleotide binding (molecular function) and phosphorylation (biological process) among the positive hit genes was observed. These terms suggest that several of the positive hit genes from the primary screen are other PM proteins, possibly competing with CFTR for the secretory pathway machinery. Regarding genes targeted by siRNAs resulting in lower F508del-CFTR PM levels, GO revealed an enrichment in PM proteins (cellular component), enzymes and metal binding, pointing to biological pathways with possible favourable effects on F508del-CFTR traffic.

Identification of Top Hits by siRNA Secondary Screening

[0095] We sought to validate the primary screen hits by rescreening the positive hit genes using distinct siRNA molecules. This secondary screen consisted of a library of 450 siRNAs targeting the 225 hit genes of the primary screen, whose impact on F508del-CFTR PM levels was scored by the same assay (FIG. 2A). Considering both the primary and secondary screens, 35 genes targeted by 2 distinct siRNAs were identified with robust increases in F508del-CFTR PM levels, i.e., above the hit threshold, in both screening rounds. This stringent criterion equates to a 15% hit validation rate. These genes, which were termed ‘confirmed hits’, when inhibited significantly increase the availability of F508del-CFTR at the PM (FIG. 2B, C) being thus potential F508del-CFTR retention factors. Notably, in the screening assay these confirmed hits rescue F508del-CFTR to a larger extent than the clinical drug VX-809 (lumacaftor, 3 μM). Enrichment analysis of these 35 hit genes did not reveal any overrepresentation of GO terms, likely due to the small sample size.

[0096] To determine the physiological relevance of these 35 confirmed hits their expression in human native lung tissue and CFBE expressing wt-CFTR was measured by RT-PCR. With the exception of 4 genes (CITED2, KIF17, ACSBG2, GUCY2D), all were found to be expressed in human native lung tissue, thus showing that ˜89% of the top hits were physiologically relevant. Expression of 3 genes (APOB, ACSBG2, GUCY2D) could not be detected in CFBE cells.

### Validation of Top F508del-CFTR Traffic Regulators by Processing and Functional Assessment

[0097] Since the 35 confirmed hits were defined solely by microscopy-based experiments, complementary assays were performed to validate them as F508del-CFTR regulators. Initially, Western blotting (WB) was used as a readout for CFTR processing and ER exit to confirm the effect of gene KDs on CFTR PM levels. CFBE cells expressing untagged F508del-CFTR were transfected with siRNAs targeting each of the 35 confirmed microscopy hits and assessed F508del-CFTR processing (FIG. 3). These experiments validated 32 of the 35 genes (91%) as putative regulators of F508del-CFTR targeting to the PM (statistically significant band C increases over control with at least 1 siRNA). The remarkable validation rate prompted us to examine whether the genes targeted by sRNAs which scored just below the hit threshold in the secondary microscopy screen could also rescue F508del-CFTR processing in a meaningful manner. Therefore, identical WB assays were performed targeting 18 additional genes which were not confirmed in the secondary screen. Knocking down all 18 genes significantly enhanced band C versus the control, indicating a greater sensitivity of WB analyses, albeit at much lower throughput. Interestingly, among the 50 genes validated in the WB assay, 5 are kinases: LRRK1, TPK1, STYK1, GRK5 and DGKG, of which the LRRK1, TPK1 and STYK1 KDs produced F508del-CFTR rescue in the HT microscopy and WB assays.

[0098] To determine whether the 35 confirmed hit genes also rescue F508del-CFTR chloride conductance, the halide-sensitive YFP (HS-YFP) fluorescence quenching assay was performed in combination with the same siRNA KDs as in the secondary microscopy screen. Cells expressing wt-CFTR were also tested. The assay validated 20 genes targeted by 26 siRNAs that significantly enhance F508del-CFTR function above control (Z-score>+1), including LRRK1 and STYK1, but not TPK1 (FIG. 4). KD of 10 of the 20 genes enhanced F508del- but not wt-CFTR function: CITED2, CLDN4, COL5A1, CREBBP, DCSTAMP, FOLR2, LDLRAD3, PCDHB2, RECQL5 and ZNF384. Conversely, only 2 gene KDs enhance wt- but not F508del-CFTR function: QRSL1 and TPK1.

Top Traffic Regulators have Mixed Effects at ERQC Folding Checkpoints

[0099] As our approach aimed at identifying proteins which retain F508del-CFTR intracellularly, some of the primary hits may be constituents of the ERQC checkpoints. To test this, the effects of their KD on the traffic of: i) wt-CFTR; ii), F508del-CFTR revertant mutations (F508del-G550E-CFTR, F508del-R1070W-CFTR, F508del-4RK-CFTR); or iii) a traffic-inhibiting CFTR mutant (DD/AA-CFTR) was assessed, all stably expressed as Tet-inducible traffic reporters in CFBE cell lines. This “classification screen” aimed at assigning each hit gene to one or more ERQC checkpoints (FIG. 5A-C). The 5 cell lines were reverse transfected with 450 siRNAs targeting the 225 primary screen hit genes and a positive effect was considered when at least 1 siRNA significantly increased CFTR PM levels (Z-score>+1. Treatment with VX-809 was used in parallel as a positive control. When excluding control siRNAs a positive effect for 22 genes for wt-CFTR, 52 genes for F508del-G550E-CFTR, 20 genes for F508del-R1070W-CFTR, 25 genes for F508del-4RK-CFTR and 38 genes for DD/AA-CFTR (FIG. 5A) was obtained. It was not clear how to interpret the MoA of the genes which were not hits for F508del-CFTR because even revertant mutants which target the same ERQC checkpoint (F508del-G550E and F508del-R1070Q) diverged significantly in the number of hit genes.

[0100] We therefore focused on the 35 confirmed hits enhancing F508del-CFTR PM and performed hierarchical clustering of the classification screen data (FIG. 5C). 7 clusters were identified, grouping siRNAs which produced the following phenotypes: Cluster 1) very strong traffic inhibition of wt-CFTR (only contains the NTNG2 gene); Cluster 2) strongly inhibit wt- and F508del-R1070W-CFTR traffic, and have mixed effects on the other CFTR variants; Cluster 3) inhibit wt- (not as strongly as Cluster 1), F508del-R1070W-, F508del-4RK- and F508del-G550E-CFTR traffic, with mixed effects on DD/AA-CFTR; Cluster 4) strongly enhance F508del-G550E, and DD/AA-CFTR traffic, strongly inhibits wt-CFTR traffic and has negligible effects on the two remaining variants (only contains the LIN9 gene); Cluster 5) mildly decrease wt- and F508del-R1070W-CFTR traffic and have mixed effects on other variants; Cluster 6) enhance traffic of all variants; Cluster 7) strongly enhance wt- and F508del-R1070W traffic.

[0101] This classification suggests that genes in Clusters 1 and 2 are highly specific F508del-CFTR traffic regulators, while those in Cluster 3 genes are less specific, given their milder phenotypes on the F508del-CFTR variants and reduced potency when combined with VX-809. The rescue of F508del-CFTR PM localization by siRNAs targeting Cluster 5 genes seem to be additive with NBD1 folding, given their enhanced rescue when combined with either VX-809 (siSTYK1, siISL2, siLRRK1) or G550E (siLDLRAD3, siCYSLTR2, siOXSR1, siNOVA1, siZNF384), a revertant proposed to stabilize NBD1 and its dimerization. Cluster 6 contains genes whose KD leads to overall increased CFTR traffic. Overall, inter-cluster differences are generally small, which was interpreted as the gene KDs targeting non-ERQC pathways or having mixed effects, targeting more than one checkpoint. Nevertheless, the kinases in this gene set (LRRK1, TPK1 and STYK1) seem to be specific F508del-CFTR regulators, given that they only achieve hit status in this mutant (either alone or in combination with VX-809), with the notable exception of LRRK1 in F508del-G550E-CFTR (FIG. 5B).

### F508del-CFTR Traffic Screen Hits are a Novel Category of CFTR Regulators

[0102] To ascertain the overall pathways targeted by F508del-CFTR traffic regulators identified here, the primary and secondary screen hits from this study were compared with published datasets of CFTR interactors and regulators or CF disease modulators (FIG. 5D): F508del-CFTR interactome in HBE41o- cells (Pankow et al., 2015), F508del-CFTR interactome in CFBE 41o- cells (Canato et al., 2018; Reilly et al., 2017), genes whose silencing significantly rescued F508del-CFTR activity (Tomati et al., 2018), candidate modifier genes of CF lung disease (Dang et al., 2020), ENaC activating genes in A549 cells (Almaça et al., 2013) and protein secretion machinery in HeLa cells (Simpson et al., 2012). 221 instances were found where the same gene was mentioned in one pair of the published datasets (gray lines). When inspecting our primary (outer track) and secondary screen hits (inner track), there were 32 instances where some of the genes were mentioned in other studies (lines in shades of red). Amongst the confirmed hits there are only 3 which appear in any of the other datasets: ARVF (Dang), COL5A1 (Reilly) and OXSR1 (Simpson). When considering the 5 kinases within the primary and secondary hits, only GRK5 can be found in one of the other datasets (Almaça), indicating that knocking down GRK5 may not only recue F508del-CFTR traffic but also inhibit ENaC activity, both of which are desirable for reversing CF symptoms. The low amount of genes which are common to this study and this dataset selection suggests that our HT screening platform is sensitive to identify CFTR regulators which may interact with CFTR indirectly or not be part of canonical CFTR regulatory networks.

[0103] Selection of kinases among top hits as potential drug targets Since the aim was to identify druggable targets enhancing F508del-CFTR traffic, 5 kinases were selected among the top hits for further studies: LRRK1, TPK1, STYK1, GRK5 and DGKG (FIG. 1A). LRRK1, TPK1 and STYK1 were hits in the primary and secondary traffic screen, as well on the WB validation. GRK5 and DGKG were hits only on the primary traffic screen but a robust F508del-CFTR rescue on WB was observed. Their KD produced high average PM scores in the primary screen and in processing assessed by WB (18- and 12.3-fold change, respectively. The motivation for this selection was the amenability of kinases to small-molecule inhibition, which makes them good drug targets. Reverse transfection of siRNAs targeting these genes in CFBE cells expressing non-tagged F508del-CFTR with and without combined administration of VX-809 (3 μM), VX-661 (5 μM) and VX-661 plus VX-445 (3 μM) (FIG. 6) was performed. Knock-down efficiency of each kinase mRNA was found to be between 22 and 60% (FIG. 7). Band C rescue was additive with VX-809 and VX-661 for GRK5 and LRRK1, and unaffected by DGKG KD. TPK1 KD reduced band C levels in the presence of correctors (FIG. 6A, B). Most interestingly, the effects of all siRNAs were potentiated when cells were treated with the clinical corrector VX-445 in addition to VX-661, except GRK5, which did not affect band C, even though band B levels were reduced when comparing VX-661 plus VX-445 versus the DMSO control (FIG. 6E). These data are suggestive of some overlap in the pathways targeted by the kinases other than LRRK1 (which is always additive) and the corrector molecules, suggesting possibly a common MoA.

[0104] To increase the pharmacological interest of the 5 selected kinases, the effect of their inhibition on the restoration of F508del-CFTR function was tested by patch-clamp. The KD of 4 out of the 5 kinases (STYK1, TPK1, GRK5 and LRRK1) rescued F508del-CFTR function, being GRK5 and LRRK1 the most effective and DGKG had no effect. To complement these observations, the functional rescue of F508del-CFTR on the forskolin-induced swelling (FIS) assay performed with intestinal organoids was also tested while knocking down the 5 hit kinases. Using a lentiviral vector encoding appropriate shRNAs it was only possible to successfully KD LRRK1, STYK1 and GRK5. Only the LRRK1 KD was effective in rescuing the swelling phenotype.

[0105] To determine whether these kinases act on the same or distinct pathways/ERQC checkpoints, the combined effects of their siRNAs on rescuing F508del-CFTR revertants (F508del-G550E, F508del-R1070W, F508del-4RK) or the DD/AA-CFTR traffic mutant were analysed.

[0106] Kinase KDs produced a complex response in the F508del-G550E and F508del-R1070W revertants, which target the first ERQC checkpoint. Knocking down LRRK1 or STYK1 does not significantly affect band C levels in most situations, either alone or in the presence of correctors, indicating that these KDs may act at the level of this checkpoint. The DGKG and GRK5 KDs are usually additive, but VX-445 has a deleterious effect on band C rescue when knocking down TPK1, DGKG or GRK5 on F508del-G550E-CFTR, suggesting a common MoA. The F508del-4RK-CFTR revertant was additive to all kinase KDs, alone or in the presence of correctors, except for TPK1 and GRK5, which produced unchanged (TPK1) or lower (GRK) band C levels. The DD/AA traffic mutant was not affected.

[0107] Finally, the specificity of CFTR traffic rescue through hit kinases KD was determined by performing kinase KDs in non-F508del-CFTR class II mutants: R560S, G85E and N1303K. No traffic rescue was observed, even in combination with CFTR folding correctors, indicating that the 5 kinases specifically regulate F508del-CFTR traffic.

### GRK5 Activity Regulates F508del-CFTR PM Stability

[0108] We selected GRK5 (G Protein-Coupled Receptor Kinase 5) for additional mechanistic studies because it was the hit kinase with best performance in rescuing F508del-CFTR in most assays, including patch-clamp and also because of its possible overlap with the pathway targeted by the VX-445 drug. Moreover, it has been proposed as a therapeutic target for cardiovascular disorders (Lieu and Koch, 2019), making it an attractive target for drug repurposing. GRK5 is involved in the transduction of ligand binding and desensitization of beta2-adrenergic receptor (β2AR). Upon binding of an agonist, GRK5 is recruited to bind and phosphorylate β2AR, thereby contributing to receptor internalization and signal termination (Pfleger et al., 2019). Importantly, β2AR is involved in endogenous CFTR activation in the epithelium (Naren et al., 2003) as its activation increases cellular cAMP levels. This provides a possible mechanistic connection between GRK5 and CFTR, which needs to be clarified in order to validate this gene as a new druggable target. Recently, the first GRK5-specific inhibitor was described: (R,Z)-3-((4-(2-Bromoacetamido)-3,5-dimethyl-1H-pyrrol-2-yl)-methylene)-2-oxo-N-(1-phenylethyl)indoline-5-carboxamide (FIG. 8), a selective covalent GRK5 Inhibitor (IC50=8.6 nM) with 1400-fold selectivity against GRK2 (Rowlands et al., 2021).

[0109] To complement our siRNA-based data and to determine whether F508del-CFTR rescue could be obtained by inhibiting GRK5 with (R,Z)-3-((4-(2-Bromoacetamido)-3,5-dimethyl-1H-pyrrol-2-yl)-methylene)-2-oxo-N-(1-phenylethyl)indoline-5-carboxamide, a dose-response WB assay was performed. CFBE cells expressing F508del-CFTR were incubated with (R,Z)-3-((4-(2-Bromoacetamido)-3,5-dimethyl-1H-pyrrol-2-yl)-methylene)-2-oxo-N-(1-phenylethyl)indoline-5-carboxamide [0-1 μM] and band C levels were quantified and compared with treatment with VX-661 (FIG. 9A). A statistically significant band C rescue was observed at 0.3 and 1.0 μM (50% of VX-661, FIG. 9B), albeit without improved CFTR processing, due to a proportional increase in band B (FIG. 9C). Higher (R,Z)-3-((4-(2-Bromoacetamido)-3,5-dimethyl-1H-pyrrol-2-yl)-methylene)-2-oxo-N-(1-phenylethyl)indoline-5-carboxamide concentrations could not be tested due to cellular toxicity (not shown).

[0110] To ascertain whether (R,Z)-3-((4-(2-Bromoacetamido)-3,5-dimethyl-1H-pyrrol-2-yl)-methylene)-2-oxo-N-(1-phenylethyl)indoline-5-carboxamide is additive to CFTR correctors, CFBE cells expressing F508del-CFTR were incubated with 1 μM (R,Z)-3-((4-(2-Bromoacetamido)-3,5-dimethyl-1H-pyrrol-2-yl)-methylene)-2-oxo-N-(1-phenylethyl)indoline-5-carboxamide in the presence and absence of VX-661, VX-445 or VX-661 plus VX-445. When performing a WB analysis (FIG. 9D-F) additivity of (R,Z)-3-((4-(2-Bromoacetamido)-3,5-dimethyl-1H-pyrrol-2-yl)-methylene)-2-oxo-N-(1-phenylethyl)indoline-5-carboxamide to all corrector treatments was observed, indicating a distinct MoA. Similarly, HS-YFP quenching studies were performed which also showed additivity in all conditions (FIG. 9G, H).

[0111] These results suggest that not only can F508del-CFTR traffic be rescued by inhibiting GRK5 with (R,Z)-3-((4-(2-Bromoacetamido)-3,5-dimethyl-1H-pyrrol-2-yl)-methylene)-2-oxo-N-(1-phenylethyl) indoline-5-carboxamide, but also that the rescue obtained with clinical correctors can be maximized by co-administrating (R,Z)-3-((4-(2-Bromoacetamido)-3,5-dimethyl-1H-pyrrol-2-yl)-methylene)-2-oxo-N-(1-phenylethyl)indoline-5-carboxamide.

[0112] This description is of course not in any way restricted to the forms of implementation presented herein and any person with an average knowledge of the area can provide many possibilities for modification thereof without departing from the general idea as defined by the claims. The preferred forms of implementation described above can obviously be combined with each other. The following claims further define the preferred forms of implementation.

### REFERENCES

[0113] (2021). Cystic Fibrosis Mutation Database.
[0114] Almaca, J., Dahimene, S., Appel, N., Conrad, C., Kunzelmann, K., Pepperkok, R., and Amaral, M. D. (2011). Functional genomics assays to study CFTR traffic and ENaC function. Methods Mol Biol 742, 249-264. 10.1007/978-1-61779-120-8_15.
[0115] Almaça, J., Faria, D., Sousa, M., Uliyakina, I., Conrad, C., Sirianant, L., Clarke, L. A., Martins, J. P., Santos, M., Hériché, J.-K., et al. (2013). High-content siRNA screen reveals global ENaC regulators and potential cystic fibrosis therapy targets. Cell 154, 1390-1400. 10.1016/j.cell.2013.08.045.
[0116] Amaral, M. D. (2004). CFTR and chaperones: processing and degradation. J Mol Neurosci 23, 41-48. 10.1385/JMN:23:1-2:041.
[0117] Amaral, M. D. (2021). How to determine the mechanism of action of CFTR modulator compounds: A gateway to theranostics. Eur J Med Chem 210, 112989. 10.1016/j.ejmech.2020.112989.
[0118] Amaral, M. D., and Farinha, C. M. (2013). Rescuing mutant CFTR: a multi-task approach to a better outcome in treating cystic fibrosis. Curr Pharm Des 19, 3497-3508.
[0119] Amaral, M. D., Farinha, C. M., Matos, P., and Botelho, H. M. (2016). Investigating Alternative Transport of Integral Plasma Membrane Proteins from the ER to the Golgi: Lessons from the Cystic Fibrosis Transmembrane Conductance Regulator (CFTR). Methods Mol Biol 1459, 105-126. 10.1007/978-1-4939-3804-9_7.
[0120] Boccella, N., Paolillo, R., and Perrino, C. (2019). Epac1 inhibition as a novel cardioprotective strategy: lights and shadows on GRK5 canonical and non-canonical functions. Cardiovasc Res 115, 1684-1686. 10.1093/cvr/cvz188.
[0121] Botelho, H. M., Uliyakina, I., Awatade, N. T., Proenca, M. C., Tischer, C., Sirianant, L., Kunzelmann, K., Pepperkok, R., and Amaral, M. D. (2015). Protein traffic disorders: an effective high-throughput fluorescence microscopy pipeline for drug discovery. Sci Rep 5, 9038. 10.1038/srep09038.
[0122] Canato, S., Santos, J. D., Carvalho, A. S., Aloria, K., Amaral, M. D., Matthiesen, R., Falcao, A. O., and Farinha, C. M. (2018). Proteomic interaction profiling reveals KIFC1 as a factor involved in early targeting of F508del-CFTR to degradation. Cell Mol Life Sci 75, 4495-4509. 10.1007/s00018-018-2896-7.
[0123] Carpenter, A. E., Jones, T. R., Lamprecht, M. R., Clarke, C., Kang, I. H., Friman, O., Guertin, D. A., Chang, J. H., Lindquist, R. A., Moffat, J., et al. (2006). CellProfiler: image analysis software for identifying and quantifying cell phenotypes. Genome Biol 7, R100. 10.1186/gb-2006-7-10-r100.
[0124] Dalemans, W., Barbry, P., Champigny, G., Jallat, S., Dott, K., Dreyer, D., Crystal, R. G., Pavirani, A., Lecocq, J. P., and Lazdunski, M. (1991). Altered chloride ion channel kinetics associated with the delta F508 cystic fibrosis mutation. Nature 354, 526-528. 10.1038/354526a0.
[0125] Dang, H., Polineni, D., Pace, R. G., Stonebraker, J. R., Corvol, H., Cutting, G. R., Drumm, M. L., Strug, L. J., O'Neal, W. K., and Knowles, M. R. (2020). Mining GWAS and eQTL data for CF lung disease modifiers by gene expression imputation. PLoS One 15, e0239189. 10.1371/journal.pone.0239189.
[0126] Dekkers, J. F., Wiegerinck, C. L., de Jonge, H. R., Bronsveld, I., Janssens, H. M., de Winter-de Groot, K. M., Brandsma, A. M., de Jong, N. W. M., Bijvelds, M. J. C., Scholte, B. J., et al. (2013). A functional CFTR assay using primary cystic fibrosis intestinal organoids. Nature Medicine 19, 939-945. 10.1038/nm.3201.
[0127] Denning, G. M., Anderson, M. P., Amara, J. F., Marshall, J., Smith, A. E., and Welsh, M. J. (1992). Processing of mutant cystic fibrosis transmembrane conductance regulator is temperature-sensitive. Nature 358, 761-764. 10.1038/358761a0.
[0128] Erfle, H., Neumann, B., Liebel, U., Rogers, P., Held, M., Walter, T., Ellenberg, J., and Pepperkok, R. (2007). Reverse transfection on cell arrays for high content screening microscopy. Nat Protoc 2, 392-399. 10.1038/nprot.2006.483.
[0129] Farinha, C. M., and Amaral, M. D. (2005). Most F508del-CFTR is targeted to degradation at an early folding checkpoint and independently of calnexin. Mol Cell Biol 25, 5242-5252. 10.1128/MCB.25.12.5242-5252.2005.
[0130] Farinha, C. M., and Canato, S. (2017). From the endoplasmic reticulum to the plasma membrane: mechanisms of CFTR folding and trafficking. Cell Mol Life Sci 74, 39-55. 10.1007/s00018-016-2387-7.
[0131] Farinha, C. M., King-Underwood, J., Sousa, M., Correia, A. R., Henriques, B. J., Roxo-Rosa, M., Da Paula, A. C., Williams, J., Hirst, S., Gomes, C. M., et al. (2013a). Revertants, Low Temperature, and Correctors Reveal the Mechanism of F508del-CFTR Rescue by VX-809 and Suggest Multiple Agents for Full Correction. Chem Biol 20, 943-955. 10.1016/j.chembiol.2013.06.004.
[0132] Farinha, C. M., Matos, P., and Amaral, M. D. (2013b). Control of cystic fibrosis transmembrane conductance regulator membrane trafficking: not just from the endoplasmic reticulum to the Golgi. FEBS J 280, 4396-4406. 10.1111/febs.12392.
[0133] Fiedorczuk, K., Chen, J. (2022). Mechanism of CFTR correction by type I folding correctors. Cell 185, 158-168. 10.1016/j.cell.2021.12.009.
[0134] Hagemeijer, M. C., Vonk, A. M., Awatade, N. T., Silva, I. A. L., Tischer, C., Hilsenstein, V., Beekman, J. M., Amaral, M. D., and Botelho, H. M. (2020). An open-source high-content analysis workflow for CFTR function measurements using the forskolin-induced swelling assay. Bioinformatics. 10.1093/bioinformatics/btaa1073.
[0135] He, L., Kota, P., Aleksandrov, A. A., Cui, L., Jensen, T., Dokholyan, N. V., and Riordan, J. R. (2013). Correctors of DeltaF508 CFTR restore global conformational maturation without thermally stabilizing the mutant protein. FASEB J 27, 536-545. 10.1096/fj.12-216119.
[0136] Homan, K. T., Waldschmidt, H. V., Glukhova, A., Cannavo, A., Song, J., Cheung, J. Y., Koch, W. J., Larsen, S. D., and Tesmer, J. J. G. (2015). Crystal Structure of G Protein-coupled Receptor Kinase 5 in Complex with a Rationally Designed Inhibitor. J Biol Chem 290, 20649-20659. 10.1074/jbc.M115.647370.
[0137] Huang da, W., Sherman, B. T., and Lempicki, R. A. (2009). Systematic and integrative analysis of large gene lists using DAVID bioinformatics resources. Nat Protoc 4, 44-57. 10.1038/nprot.2008.211.
[0138] Lieu, M., and Koch, W. J. (2019). GRK2 and GRK5 as therapeutic targets and their role in maladaptive and pathological cardiac hypertrophy. Expert Opin Ther Targets 23, 201-214. 10.1080/14728222.2019.1575363.
[0139] Lopes-Pacheco, M., Silva, I. A. L., Turner, M. J., Carlile, G. W., Sondo, E., Thomas, D. Y., Pedemonte, N., Hanrahan, J. W., and Amaral, M. D. (2020). Characterization of the mechanism of action of RDR01752, a novel corrector of F508del-CFTR. Biochem Pharmacol 180, 114133. 10.1016/j.bcp.2020.114133.
[0140] MacKenzie, T., Gifford, A. H., Sabadosa, K. A., Quinton, H. B., Knapp, E. A., Goss, C. H., and Marshall, B. C. (2014). Longevity of patients with cystic fibrosis in 2000 to 2010 and beyond: survival analysis of the Cystic Fibrosis Foundation patient registry. Ann Intern Med 161, 233-241. 10.7326/M13-0636.
[0141] Middleton, P. G., Mall, M. A., Drevinek, P., Lands, L. C., McKone, E. F., Polineni, D., Ramsey, B. W., Taylor-Cousar, J. L., Tullis, E., Vermeulen, F., et al. (2019). Elexacaftor-Tezacaftor-Ivacaftor for Cystic Fibrosis with a Single Phe508del Allele. N Engl J Med 381, 1809-1819. 10.1056/NEJMoa1908639.
[0142] Moniz, S., Sousa, M., Moraes, B. J., Mendes, A. I., Palma, M., Barreto, C., Fragata, J. I., Amaral, M. D., and Matos, P. (2013). HGF stimulation of Rac1 signaling enhances pharmacological correction of the most prevalent cystic fibrosis mutant F508del-CFTR. ACS Chem Biol 8, 432-442. 10.1021/cb300484r.
[0143] Naren, A. P., Cobb, B., Li, C., Roy, K., Nelson, D., Heda, G. D., Liao, J., Kirk, K. L., Sorscher, E. J., Hanrahan, J., et al. (2003). A macromolecular complex of beta 2 adrenergic receptor, CFTR, and ezrin/radixin/moesin-binding phosphoprotein 50 is regulated by PKA. Proc Natl Acad Sci USA 100, 342-346. 10.1073/pnas.0135434100.
[0144] Neumann, B., Walter, T., Hériché, J.-K., Bulkescher, J., Erfle, H., Conrad, C., Rogers, P., Poser, I., Held, M., Liebel, U., et al. (2010). Phenotypic profiling of the human genome by time-lapse microscopy reveals cell division genes. Nature 464, 721-727. 10.1038/nature08869.
[0145] Nishimura, N., and Balch, W. E. (1997). A di-acidic signal required for selective export from the endoplasmic reticulum. Science 277, 556-558.
[0146] Okiyoneda, T., Veit, G., Dekkers, J. F., Bagdany, M., Soya, N., Xu, H., Roldan, A., Verkman, A. S., Kurth, M., Simon, A., et al. (2013). Mechanism-based corrector combination restores DeltaF508-CFTR folding and function. Nat Chem Biol 9, 444-454. 10.1038/nchembio.1253.
[0147] Pankow, S., Bamberger, C., Calzolari, D., Martínez-Bartolomé, S., Lavallee-Adam, M., Balch, W. E., and Yates, J. R., 3rd (2015). AF508 CFTR interactome remodelling promotes rescue of cystic fibrosis. Nature 528, 510-516. 10.1038/nature15729.
[0148] Pedemonte, N., Zegarra-Moran, O., and Galietta, L. J. (2011). High-throughput screening of libraries of compounds to identify CFTR modulators. Methods Mol Biol 741, 13-21. 10.1007/978-1-61779-117-8_2.
[0149] Perkins, L. A., Fisher, G. W., Naganbabu, M., Schmidt, B. F., Mun, F., and Bruchez, M. P. (2018). High-Content Surface and Total Expression siRNA Kinase Library Screen with VX-809 Treatment Reveals Kinase Targets that Enhance F508del-CFTR Rescue. Mol Pharm 15, 759-767. 10.1021/acs.molpharmaceut.7b00928.
[0150] Pfleger, J., Gresham, K., and Koch, W. J. (2019). G protein-coupled receptor kinases as therapeutic targets in the heart. Nat Rev Cardiol 16, 612-622. 10.1038/s41569-019-0220-3.
[0151] Reilly, R., Mroz, M. S., Dempsey, E., Wynne, K., Keely, S. J., McKone, E. F., Hiebel, C., Behl, C., and Coppinger, J. A. (2017). Targeting the PI3K/Akt/mTOR signalling pathway in Cystic Fibrosis. Sci Rep 7, 7642. 10.1038/s41598-017-06588-z.
[0152] Riordan, J. R., Rommens, J. M., Kerem, B., Alon, N., Rozmahel, R., Grzelczak, Z., Zielenski, J., Lok, S., Plavsic, N., Chou, J. L., et al. (1989). Identification of the cystic fibrosis gene: cloning and characterization of complementary DNA. Science 245, 1066-1073.
[0153] Rowlands, R. A., Chen, Q., Bouley, R. A., Avramova, L. V., Tesmer, J. J. G., and White, A. D. (2021). Generation of Highly Selective, Potent, and Covalent G Protein-Coupled Receptor Kinase 5 Inhibitors. J Med Chem 64, 566-585. 10.1021/acs.jmedchem.0c01522.
[0154] Simpson, J. C., Joggerst, B., Laketa, V., Verissimo, F., Cetin, C., Erfle, H., Bexiga, M. G., Singan, V. R., Heriche, J. K., Neumann, B., et al. (2012). Genome-wide RNAi screening identifies human proteins with a regulatory function in the early secretory pathway. Nat Cell Biol 14, 764-774. 10.1038/ncb2510.
[0155] Sondo, E., Tomati, V., Caci, E., Esposito, A. I., Pfeffer, U., Pedemonte, N., and Galietta, L. J. (2011). Rescue of the mutant CFTR chloride channel by pharmacological correctors and low temperature analyzed by gene expression profiling. Am J Physiol Cell Physiol 301, C872-885. 10.1152/ajpcell.00507.2010.
[0156] Taylor-Cousar, J. L., Munck, A., McKone, E. F., van der Ent, C. K., Moeller, A., Simard, C., Wang, L. T., Ingenito, E. P., McKee, C., Lu, Y., et al. (2017). Tezacaftor-Ivacaftor in Patients with Cystic Fibrosis Homozygous for Phe508del. N Engl J Med 377, 2013-2023. 10.1056/NEJMoa1709846.
[0157] Thomas, P. D., Campbell, M. J., Kejariwal, A., Mi, H., Karlak, B., Daverman, R., Diemer, K., Muruganujan, A., and Narechania, A. (2003). PANTHER: a library of protein families and subfamilies indexed by function. Genome Res 13, 2129-2141. 10.1101/gr.772403.
[0158] Tomati, V., Pesce, E., Caci, E., Sondo, E., Scudieri, P., Marini, M., Amato, F., Castaldo, G., Ravazzolo, R., Galietta, L. J. V., et al. (2018). High-throughput screening identifies FAU protein as a regulator of mutant cystic fibrosis transmembrane conductance regulator channel. J Biol Chem 293, 1203-1217. 10.1074/jbc.M117.816595.
[0159] Traynham, C. J., Hullmann, J., and Koch, W. J. (2016). “Canonical and non-canonical actions of GRK5 in the heart”. J Mol Cell Cardiol 92, 196-202. 10.1016/j.yjmcc.2016.01.027.
[0160] Wang, X., Matteson, J., An, Y., Moyer, B., Yoo, J. S., Bannykh, S., Wilson, I. A., Riordan, J. R., and Balch, W. E. (2004). COPII-dependent export of cystic fibrosis transmembrane conductance regulator from the ER uses a di-acidic exit code. J Cell Biol 167, 65-74. 10.1083/jcb.200401035.
[0161] Yarwood, R., Hellicar, J., Woodman, P. G., and Lowe, M. (2020). Membrane trafficking in health and disease. Dis Model Mech 13, dmm043448. 10.1242/dmm.043448.
[0162] Younger, J. M., Chen, L., Ren, H. Y., Rosser, M. F., Turnbull, E. L., Fan, C. Y., Patterson, C., and Cyr, D. M. (2006). Sequential quality-control checkpoints triage misfolded cystic fibrosis transmembrane conductance regulator. Cell 126, 571-582. 10.1016/j.cell.2006.06.041.

1. A method of identifying agents for the treatment of Cystic Fibrosis caused by the mutation F508del in the gene encoding the transmembrane conductance regulator protein (F508del-CFTR) comprising the steps of:
a) contacting a candidate agent with at least one gene sequence selected from SEQ ID Nos: 228 to 478 or with at least one of its protein products of SEQ ID Nos: 1 to 227 as therapeutic targets;
b) determining whether the candidate agent modulates the activity of the F508del-CFTR protein and its plasma membrane traffic.

2. Method according to claim 1, wherein at least one gene sequence is selected from the group consisting of SEQ ID Nos: 232, 237, 238, 250, 253, 257, 259, 263, 276, 285, 296, 297, 301, 317, 318, 319, 333, 338, 369, 378, 396, 401, 405, 409, 410, 411, 417, 420, 421, 430, 442, 450, 458, 459, 471, 472 and 478.

3. Method according to claim 1, wherein activity modulation is affected by inhibiting gene expression of at least one gene sequence selected from SEQ ID Nos: 228 to 478 or the activity of at least one of its protein products of SEQ ID Nos: 1 to 227.

4. Method according to claim 1, wherein the candidate agents identified inhibit the activity of at least one gene sequence selected from SEQ ID Nos: 228 to 478 or the activity of at least one of its protein products of SEQ ID Nos: 1 to 227 by more than 20% relative to the activity in the absence of the candidate agent.

5. Method according to claim 1, wherein inhibition is affected by reducing gene expression of at least one gene sequence selected from Seq.ID: 228 to 478.

6. Method according to claim 1, wherein the activity is inhibited on the protein level of at least one protein sequence selected from SEQ ID Nos: 1 to 227.

7. Method according to claim 1, wherein the ability of the candidate agent to bind to a protein product, or a domain thereof, from at least one gene sequence selected from SEQ ID Nos: 228 to 478 or from at least one protein sequence from SEQ ID Nos: 1 to 227 is determined.

8. Method according to claim 1, wherein the gene sequence protein products are TPK1, LRRK1, STYK1, GRK5 or DGKG.

9. Method according to claim 1, wherein (R,Z)-3-((4-(2-Bromoacetamido)-3,5-dimethyl-1H-pyrrol-2-yl)-methylene)-2-oxo-N-(1-phenylethyl)indoline-5-carboxamide is the candidate agent.

10. Method according to claim 1, wherein the method is carried out as a high-throughput assay.

11. Method according to claim 1, wherein the method is carried out as a cell-based assay.

12. An agent for use in the treatment of Cystic Fibrosis caused by the mutation F508del in the gene encoding the CFTR protein identified by the method of claim 1.

13. The agent according to claim 12, wherein the agent is (R,Z)-3-((4-(2-Bromoacetamido)-3,5-dimethyl-1H-pyrrol-2-yl)-methylene)-2-oxo-N-(1-phenylethyl)indoline-5-carboxamide.

14. A pharmaceutical composition comprising the agent of claim 12.

15. The pharmaceutical composition according to claim 14 further comprising at least one pharmaceutically acceptable diluent, carrier, adjuvant or an excipient.

The application's sequence listing, which the Patent Office published only in electronic form, follows.

SEQUENCE LISTING (478 sequences)

SEQ ID NO: 1 - protein, 822 aa, Homo sapiens
  source 1..822: note = sp|P16591|FER_HUMAN Tyrosine-protein kinase Fer; OS = Homo sapiens OX=9606 GN=FER PE=1 SV=2
MGFGSDLKNSHEAVLKLQDWELRLLETVKKFMALRIKSDKEYASTLQNLCNQVDKESTVQMNYVSNVSKSWLLMIQQTEQLSRIMKTHAEDLNSGPLHRLTMMIKDKQQVKKSYIGVHQQIEAEMIKVTKTELEKLKCSYRQLIKEMNSAKEKYKEALAKGKETEKAKERYDKATMKLHMLHNQYVLALKGAQLHQNQYYDITLPLLLDSLQKMQEEMIKALKGIFDEYSQITSLVTEEIVNVHKEIQMSVEQIDPSTEYNNFIDVHRTTAAKEQEIEFDTSLLEENENLQANEIMWNNLTAESLQVMLKTLAEELMQTQQMLLNKEEAVLELEKRIEESSETCEKKSDIVLLLSQKQALEELKQSVQQLRCTEAKFSAQKELLEQKVQENDGKEPPPVVNYEEDARSVTSMERKERLSKFESIRHSIAGIIRSPKSALGSSALSDMISISEKPLAEQDWYHGAIPRIEAQELLKKQGDFLVRESHGKPGEYVLSVYSDGQRRHFIIQYVDNMYRFEGTGFSNIPQLIDHHYTTKQVITKKSGVVLLNPIPKDKKWILSHEDVILGELLGKGNFGEVYKGTLKDKTSVAVKTCKEDLPQELKIKFLQEAKILKQYDHPNIVKLIGVCTQRQPVYIIMELVSGGDFLTFLRRKKDELKLKQLVKFSLDAAAGMLYLESKNCIHRDLAARNCLVGENNVLKISDFGMSRQEDGGVYSSSGLKQIPIKWTAPEALNYGRYSSESDVWSFGILLWETFSLGVCPYPGMTNQQAREQVERGYRMSAPQHCPEDISKIMMKCWDYKPENRPKFSELQKELTIIKRKLT

SEQ ID NO: 2 - protein, 452 aa, Homo sapiens
  source 1..452: note = sp|Q9HB40|RISC_HUMAN Retinoid-inducible serine carboxypeptidase OS=Homo sapiens OX=9606 GN=SCPEP1 PE=1; SV = 1
MELALRRSPVPRWLLLLPLLLGLNAGAVIDWPTEEGKEVWDYVTVRKDAYMFWWLYYATNSCKNFSELPLVMWLQGGPGGSSTGFGNFEEIGPLDSDLKPRKTTWLQAASLLFVDNPVGTGFSYVNGSGAYAKDLAMVASDMMVLLKTFFSCHKEFQTVPFYIFSESYGGKMAAGIGLELYKAIQRGTIKCNFAGVALGDSWISPVDSVLSWGPYLYSMSLLEDKGLAEVSKVAEQVLNAVNKGLYREATELWGKAEMIIEQNTDGVNFYNILTKSTPTSTMESSLEFTQSHLVCLCQRHVRHLQRDALSQLMNGPIRKKLKIIPEDQSWGGQATNVFVNMEEDFMKPVISIVDELLEAGINVTVYNGQLDLIVDTMGQEAWVRKLKWPELPKFSQLKWKALYSDPKSLETSAFVKSYKNLAFYWILKAGHMVPSDQGDMALKMMRLVTQQE

SEQ ID NO: 3 - protein, 1158 aa, Homo sapiens
  source 1..1158: note = sp|P48552|NRIP1_HUMAN Nuclear receptor-interacting protein 1 OS=Homo sapiens OX=9606 GN=NRIP1 PE=1 SV=2
MTHGEELGSDVHQDSIVLTYLEGLLMHQAAGGSGTAVDKKSAGHNEEDQNFNISGSAFPTCQSNGPVLNTHTYQGSGMLHLKKARLLQSSEDWNAAKRKRLSDSIMNLNVKKEALLAGMVDSVPKGKQDSTLLASLLQSFSSRLQTVALSQQIRQSLKEQGYALSHDSLKVEKDLRCYGVASSHLKTLLKKSKVKDQKPDTNLPDVTKNLIRDRFAESPHHVGQSGTKVMSEPLSCAARLQAVASMVEKRASPATSPKPSVACSQLALLLSSEAHLQQYSREHALKTQNANQAASERLAAMARLQENGQKDVGSYQLPKGMSSHLNGQARTSSSKLMASKSSATVFQNPMGIIPSSPKNAGYKNSLERNNIKQAANNSLLLHLLKSQTIPKPMNGHSHSERGSIFEESSTPTTIDEYSDNNPSFTDDSSGDESSYSNCVPIDLSCKHRTEKSESDQPVSLDNFTQSLLNTWDPKVPDVDIKEDQDTSKNSKLNSHQKVTLLQLLLGHKNEENVEKNTSPQGVHNDVSKFNTQNYARTSVIESPSTNRTTPVSTPPLLTSSKAGSPINLSQHSLVIKWNSPPYVCSTQSEKLTNTASNHSMDLTKSKDPPGEKPAQNEGAQNSATFSASKLLQNLAQCGMQSSMSVEEQRPSKQLLTGNTDKPIGMIDRLNSPLLSNKTNAVEENKAFSSQPTGPEPGLSGSEIENLLERRTVLQLLLGNPNKGKSEKKEKTPLRDESTQEHSERALSEQILMVKIKSEPCDDLQIPNTNVHLSHDAKSAPFLGMAPAVQRSAPALPVSEDFKSEPVSPQDFSFSKNGLLSRLLRQNQDSYLADDSDRSHRNNEMALLESKNLCMVPKKRKLYTEPLENPFKKMKNNIVDAANNHSAPEVLYGSLLNQEELKFSRNDLEFKYPAGHGSASESEHRSWARESKSFNVLKQLLLSENCVRDLSPHRSNSVADSKKKGHKNNVTNSKPEFSISSLNGLMYSSTQPSSCMDNRTFSYPGVVKTPVSPTFPEHLGCAGSRPESGLLNGCSMPSEKGPIKWVITDAEKNEYEKDSPRLTKTNPILYYMLQKGGNSVTSRETQDKDIWREASSAESVSQVTAKEELLPTAETKASFFNLRSPYNSHMGNNASRPHSANGEVYGLLGSVLTIKKESE

SEQ ID NO: 4 - protein, 541 aa, Homo sapiens
  source 1..541: note = sp|P48643|TCPE_HUMAN T-complex protein 1 subunit epsilon OS=Homo sapiens OX=9606 GN=CCT5 PE=1 SV=1
MASMGTLAFDEYGRPFLIIKDQDRKSRLMGLEALKSHIMAAKAVANTMRTSLGPNGLDKMMVDKDGDVTVTNDGATILSMMDVDHQIAKLMVELSKSQDDEIGDGTTGVVVLAGALLEEAEQLLDRGIHPIRIADGYEQAARVAIEHLDKISDSVLVDIKDTEPLIQTAKTTLGSKVVNSCHRQMAEIAVNAVLTVADMERRDVDFELIKVEGKVGGRLEDTKLIKGVIVDKDFSHPQMPKKVEDAKIAILTCPFEPPKPKTKHKLDVTSVEDYKALQKYEKEKFEEMIQQIKETGANLAICQWGFDDEANHLLLQNNLPAVRWVGGPEIELIAIATGGRIVPRFSELTAEKLGFAGLVQEISFGTTKDKMLVIEQCKNSRAVTIFIRGGNKMIIEEAKRSLHDALCVIRNLIRDNRVVYGGGAAEISCALAVSQEADKCPTLEQYAMRAFADALEVIPMALSENSGMNPIQTMTEVRARQVKEMNPALGIDCLHKGTNDMKQQHVIETLIGKKQQISLATQMVRMILKIDDIRKPGESEE

SEQ ID NO: 5 - protein, 2015 aa, Homo sapiens
  source 1..2015: note = sp|Q38SD2|LRRK1_HUMAN Leucine-rich repeat serine/threonine-protein kinase 1 OS=Homo sapiens OX=9606; GN = LRRK1 PE=1 SV=3
MAGMSQRPPSMYWCVGPEESAVCPERAMETLNGAGDTGGKPSTRGGDPAARSRRTEGIRAAYRRGDRGGARDLLEEACDQCASQLEKGQLLSIPAAYGDLEMVRYLLSKRLVELPTEPTDDNPAVVAAYFGHTAVVQELLESLPGPCSPQRLLNWMLALACQRGHLGVVKLLVLTHGADPESYAVRKNEFPVIVRLPLYAAIKSGNEDIAIFLLRHGAYFCSYILLDSPDPSKHLLRKYFIEASPLPSSYPGKTALRVKWSHLRLPWVDLDWLIDISCQITELDLSANCLATLPSVIPWGLINLRKLNLSDNHLGELPGVQSSDEIICSRLLEIDISSNKLSHLPPGFLHLSKLQKLTASKNCLEKLFEEENATNWIGLRKLQELDISDNKLTELPALFLHSFKSLNSLNVSRNNLKVFPDPWACPLKCCKASRNALECLPDKMAVFWKNHLKDVDFSENALKEVPLGLFQLDALMFLRLQGNQLAALPPQEKWTCRQLKTLDLSRNQLGKNEDGLKTKRIAFFTTRGRQRSGTEAASVLEFPAFLSESLEVLCLNDNHLDTVPPSVCLLKSLSELYLGNNPGLRELPPELGQLGNLWQLDTEDLTISNVPAEIQKEGPKAMLSYLRAQLRKAEKCKLMKMIIVGPPRQGKSTLLEILQTGRAPQVVHGEATIRTTKWELQRPAGSRAKVESVEFNVWDIGGPASMATVNQCFFTDKALYVVVWNLALGEEAVANLQFWLLNIEAKAPNAVVLVVGTHLDLIEAKFRVERIATLRAYVLALCRSPSGSRATGFPDITFKHLHEISCKSLEGQEGLRQLIFHVTCSMKDVGSTIGCQRLAGRLIPRSYLSLQEAVLAEQQRRSRDDDVQYLTDRQLEQLVEQTPDNDIKDYEDLQSAISFLIETGTLLHFPDTSHGLRNLYFLDPIWLSECLQRIFNIKGSRSVAKNGVIRAEDLRMLLVGTGFTQQTEEQYFQFLAKFEIALPVANDSYLLPHLLPSKPGLDTHGMRHPTANTIQRVFKMSFVPVGFWQRFIARMLISLAEMDLQLFENKKNTKSRNRKVTIYSFTGNQRNRCSTFRVKRNQTIYWQEGLLVTFDGGYLSVESSDVNWKKKKSGGMKIVCQSEVRDFSAMAFITDHVNSLIDQWFPALTATESDGTPLMEQYVPCPVCETAWAQHTDPSEKSEDVQYFDMEDCVLTAIERDFISCPRHPDLPVPLQELVPELFMTDFPARLFLENSKLEHSEDEGSVLGQGGSGTVIYRARYQGQPVAVKRFHIKKFKNFANVPADTMLRHLRATDAMKNFSEFRQEASMLHALQHPCIVALIGISIHPLCFALELAPLSSLNTVLSENARDSSFIPLGHMLTQKIAYQIASGLAYLHKKNIIFCDLKSDNILVWSLDVKEHINIKLSDYGISRQSFHEGALGVEGTPGYQAPEIRPRIVYDEKVDMFSYGMVLYELLSGQRPALGHHQLQIAKKLSKGIRPVLGQPEEVQFRRLQALMMECWDTKPEKRPLALSVVSQMKDPTFATFMYELCCGKQTAFFSSQGQEYTVVFWDGKEESRNYTVVNTEKGLMEVQRMCCPGMKVSCQLQVQRSLWTATEDQKIYIYTLKGMCPLNTPQQALDTPAVVTCFLAVPVIKKNSYLVLAGLADGLVAVFPVVRGTPKDSCSYLCSHTANRSKFSIADEDARQNPYPVKAMEVVNSGSEVWYSNGPGLLVIDCASLEICRRLEPYMAPSMVTSVVCSSEGRGEEVVWCLDDKANSLVMYHSTTYQLCARYFCGVPSPLRDMFPVRPLDTEPPAASHTANPKVPEGDSIADVSIMYSEELGTQILIHQESLTDYCSMSSYSSSPPRQAARSPSSLPSSPASSSSVPFSTDCEDSDMLHTPGAASDRSEHDLTPMDGETFSQHLQAVKILAVRDLIWVPRRGGDVIVIGLEKDSGAQRGRVIAVLKARELTPHGVLVDAAVVAKDTVVCTFENENTEWCLAVWRGWGAREFDIFYQSYEELGRLEACTRKRR

SEQ ID NO: 6 - protein, 590 aa, Homo sapiens
  source 1..590: note = sp|P34947|GRK5_HUMAN G protein-coupled receptor kinase 5 OS=Homo sapiens OX=9606 GN=GRK5 PE=1 SV=1
MELENIVANTVLLKAREGGGGKRKGKSKKWKEILKFPHISQCEDLRRTIDRDYCSLCDKQPIGRLLFRQFCETRPGLECYIQFLDSVAEYEVTPDEKLGEKGKEIMTKYLTPKSPVFIAQVGQDLVSQTEEKLLQKPCKELFSACAQSVHEYLRGEPFHEYLDSMFFDRFLQWKWLERQPVTKNTFRQYRVLGKGGFGEVCACQVRATGKMYACKRLEKKRIKKRKGESMALNEKQILEKVNSQFVVNLAYAYETKDALCLVLTIMNGGDLKFHIYNMGNPGFEEERALFYAAEILCGLEDLHRENTVYRDLKPENILLDDYGHIRISDLGLAVKIPEGDLIRGRVGTVGYMAPEVLNNQRYGLSPDYWGLGCLIYEMIEGQSPFRGRKEKVKREEVDRRVLETEEVYSHKFSEEAKSICKMLLTKDAKQRLGCQEEGAAEVKRHPFFRNMNFKRLEAGMLDPPFVPDPRAVYCKDVLDIEQFSTVKGVNLDHTDDDFYSKFSTGSVSIPWQNEMIETECFKELNVFGPNGTLPPDLNRNHPPEPPKKGLLQRLFKRQHQNNSKSSPSSKTSFNHHINSNHVSSNSTGSS

SEQ ID NO: 7 - protein, 270 aa, Homo sapiens
  source 1..270: note = sp|Q9NS61|KCIP2_HUMAN Kv channel-interacting protein 2 OS=Homo sapiens OX=9606 GN=KCNIP2 PE=1 SV=3
MRGQGRKESLSDSRDLDGSYDQLTGHPPGPTKKALKQRFLKLLPCCGPQALPSVSETLAAPASLRPHRPRLLDPDSVDDEFELSTVCHRPEGLEQLQEQTKFTRKELQVLYRGFKNECPSGIVNEENFKQIYSQFFPQGDSSTYATFLFNAFDTNHDGSVSFEDFVAGLSVILRGTVDDRLNWAFNLYDLNKDGCITKEEMLDIMKSIYDMMGKYTYPALREEAPREHVESFFQKMDRNKDGVVTIEEFIESCQKDENIMRSMQLFDNVI

SEQ ID NO: 8 - protein, 488 aa, Homo sapiens
  source 1..488: note = sp|P35408|PE2R4_HUMAN Prostaglandin E2 receptor EP4 subtype OS=Homo sapiens OX=9606 GN=PTGER4 PE=1 SV=1
MSTPGVNSSASLSPDRLNSPVTIPAVMFIFGVVGNLVAIVVLCKSRKEQKETTFYTLVCGLAVTDLLGTLLVSPVTIATYMKGQWPGGQPLCEYSTFILLFFSLSGLSIICAMSVERYLAINHAYFYSHYVDKRLAGLTLFAVYASNVLFCALPNMGLGSSRLQYPDTWCFIDWTTNVTAHAAYSYMYAGFSSFLILATVLCNVLVCGALLRMHRQFMRRTSLGTEQHHAAAAASVASRGHPAASPALPRLSDFRRRRSFRRIAGAEIQMVILLIATSLVVLICSIPLVVRVFVNQLYQPSLEREVSKNPDLQAIRIASVNPILDPWIYILLRKTVLSKAIEKIKCLFCRIGGSRRERSGQHCSDSQRTSSAMSGHSRSFISRELKEISSTSQTLLPDLSLPDLSENGLGGRNLLPGVPGMGLAQEDTTSLRTLRISETSDSSQGQDSESVLLVDEAGGSGRAGPAPKGSSLQVTFPSETLNLSEKCI

SEQ ID NO: 9 - protein, 366 aa, Homo sapiens
  source 1..366: note = sp|Q6Q788|APOA5_HUMAN Apolipoprotein A-V OS=Homo sapiens OX=9606 GN=APOA5 PE=1 SV=1
MASMAAVLTWALALLSAFSATQARKGFWDYFSQTSGDKGRVEQIHQQKMAREPATLKDSLEQDLNNMNKFLEKLRPLSGSEAPRLPQDPVGMRRQLQEELEEVKARLQPYMAEAHELVGWNLEGLRQQLKPYTMDLMEQVALRVQELQEQLRVVGEDTKAQLLGGVDEAWALLQGLQSRVVHHTGRFKELFHPYAESLVSGIGRHVQELHRSVAPHAPASPARLSRCVQVLSRKLTLKAKALHARIQQNLDQLREELSRAFAGTGTEEGAGPDPQMLSEEVRQRLQAFRQDTYLQIAAFTRAIDQETEEVQQQLAPPPPGHSAFAPEFQQTDSGKVLSKLQARLDDLWEDITHSLHDQGHSHLGDP

SEQ ID NO: 10 - protein, 243 aa, Homo sapiens [sequence omitted]

SEQ ID NO: 11 - protein, 1995 aa, Homo sapiens
  source 1..1995: note = sp|Q7Z406|MYH14_HUMAN Myosin-14 OS=Homo sapiens; OX = 9606 GN=MYH14 PE=1 SV=2
MAAVTMSVPGRKAPPRPGPVPEAAQPFLFTPRGPSAGGGPGSGTSPQVEWTARRLVWVPSELHGFEAAALRDEGEEEAEVELAESGRRLRLPRDQIQRMNPPKFSKAEDMAELTCLNEASVLHNLRERYYSGLIYTYSGLFCVVINPYKQLPIYTEAIVEMYRGKKRHEVPPHVYAVTEGAYRSMLQDREDQSILCTGESGAGKTENTKKVIQYLAHVASSPKGRKEPGVPGELERQLLQANPILEAFGNAKTVKNDNSSRFGKFIRINFDVAGYIVGANIETYLLEKSRAIRQAKDECSFHIFYQLLGGAGEQLKADLLLEPCSHYRFLTNGPSSSPGQERELFQETLESLRVLGFSHEEIISMLRMVSAVLQFGNIALKRERNTDQATMPDNTAAQKLCRLLGLGVTDFSRALLTPRIKVGRDYVQKAQTKEQADFALEALAKATYERLFRWLVLRLNRALDRSPRQGASFLGILDIAGFEIFQLNSFEQLCINYTNEKLQQLFNHTMFVLEQEEYQREGIPWTFLDFGLDLQPCIDLIERPANPPGLLALLDEECWFPKATDKSFVEKVAQEQGGHPKFQRPRHLRDQADFSVLHYAGKVDYKANEWLMKNMDPLNDNVAALLHQSTDRLTAEIWKDVEGIVGLEQVSSLGDGPPGGRPRRGMFRTVGQLYKESLSRLMATLSNTNPSFVRCIVPNHEKRAGKLEPRLVLDQLRCNGVLEGIRICRQGFPNRILFQEFRQRYEILTPNAIPKGFMDGKQACEKMIQALELDPNLYRVGQSKIFFRAGVLAQLEEERDLKVTDIIVSFQAAARGYLARRAFQKRQQQQSALRVMQRNCAAYLKLRHWQWWRLFTKVKPLLQVTRQDEVLQARAQELQKVQELQQQSAREVGELQGRVAQLEEERARLAEQLRAEAELCAEAEETRGRLAARKQELELVVSELEARVGEEEECSRQMQTEKKRLQQHIQELEAHLEAEEGARQKLQLEKVTTEAKMKKFEEDLLLLEDQNSKLSKERKLLEDRLAEFSSQAAEEEEKVKSLNKLRLKYEATIADMEDRLRKEEKGRQELEKLKRRLDGESSELQEQMVEQQQRAEELRAQLGRKEEELQAALARAEDEGGARAQLLKSLREAQAALAEAQEDLESERVARTKAEKQRRDLGEELEALRGELEDTLDSTNAQQELRSKREQEVTELKKTLEEETRIHEAAVQELRQRHGQALGELAEQLEQARRGKGAWEKTRLALEAEVSELRAELSSLQTARQEGEQRRRRLELQLQEVQGRAGDGERARAEAAEKLQRAQAELENVSGALNEAESKTIRLSKELSSTEAQLHDAQELLQEETRAKLALGSRVRAMEAEAAGLREQLEEEAAARERAGRELQTAQAQLSEWRRRQEEEAGALEAGEEARRRAAREAEALTQRLAEKTETVDRLERGRRRLQQELDDATMDLEQQRQLVSTLEKKQRKFDQLLAEEKAAVLRAVEERERAEAEGREREARALSLTRALEEEQEAREELERQNRALRAELEALLSSKDDVGKSVHELERACRVAEQAANDLRAQVTELEDELTAAEDAKLRLEVTVQALKTQHERDLQGRDEAGEERRRQLAKQLRDAEVERDEERKQRTLAVAARKKLEGELEELKAQMASAGQGKEEAVKQLRKMQAQMKELWREVEETRTSREEIFSQNRESEKRLKGLEAEVLRLQEELAASDRARRQAQQDRDEMADEVANGNLSKAAILEEKRQLEGRLGQLEEELEEEQSNSELLNDRYRKLLLQVESLTTELSAERSFSAKAESGRQQLERQIQELRGRLGEEDAGARARHKMTIAALESKLAQAEEQLEQETRERILSGKLVRRAEKRLKEVVLQVEEERRVADQLRDQLEKGNLRVKQLKRQLEEAEEEASRAQAGRRRLQRELEDVTESAESMNREVTTLRNRLRRGPLTFTTRTVRQVFRLEEGVASDEEAEEAQPGSGPSPEPEGSPPAHPQ

SEQ ID NO: 12 - protein, 512 aa, Homo sapiens
  source 1..512: note = sp|Q8N108|MIER1_HUMAN Mesoderm induction early response protein 1 OS=Homo sapiens OX=9606 GN=MIER1 PE=1; SV = 2
MAEPSVESSSPGGSATSDDHEFDPSADMLVHDFDDERTLEEEEMMEGETNFSSEIEDLAREGDMPIHELLSLYGYGSTVRLPEEDEEEEEEEEEGEDDEDADNDDNSGCSGENKEENIKDSSGQEDETQSSNDDPSQSVASQDAQEIIRPRRCKYFDTNSEVEEESEEDEDYIPSEDWKKEIMVGSMFQAEIPVGICRYKENEKVYENDDQLLWDPEYLPEDKVIIFLKDASRRTGDEKGVEAIPEGSHIKDNEQALYELVKCNFDTEEALRRLRFNVKAAREELSVWTEEECRNFEQGLKAYGKDFHLIQANKVRTRSVGECVAFYYMWKKSERYDFFAQQTRFGKKKYNLHPGVTDYMDRLLDESESAASSRAPSPPPTASNSSNSQSEKEDGTVSTANQNGVSSNGPGEILNKEEVKVEGLHINGPTGGNKKPLHADMDTNGYETDNLTTDPKLAHMTARNENDFDEKSERPAKRRRVNSNGKESPGSSEFFQEAVSHGKFEELENTDD

SEQ ID NO: 13 - protein, 605 aa, Homo sapiens
  source 1..605: note = sp|Q8WTR4|GDPD5_HUMAN Glycerophosphodiester phosphodiesterase domain-containing protein 5 OS=Homo sapiens OX=9606 GN=GDPD5 PE=1 SV=2
MVRHQPLQYYEPQLCLSCLTGIYGCRWKRYQRSHDDTTPWERLWFLLLTFTFGLTLTWLYFWWEVHNDYDEFNWYLYNRMGYWSDWPVPILVTTAAAFAYIAGLLVLALCHIAVGQQMNLHWLHKIGLVVILASTVVAMSAVAQLWEDEWEVLLISLQGTAPFLHVGAVAAVTMLSWIVAGQFARAERTSSQVTILCTFFTVVFALYLAPLTISSPCIMEKKDLGPKPALIGHRGAPMLAPEHTLMSFRKALEQKLYGLQADITISLDGVPFLMHDTTLRRTTNVEEEFPELARRPASMLNWTTLQRLNAGQWFLKTDPFWTASSLSPSDHREAQNQSICSLAELLELAKGNATLLLNLRDPPREHPYRSSFINVTLEAVLHSGFPQHQVMWLPSRQRPLVRKVAPGFQQTSGSKEAVASLRRGHIQRLNLRYTQVSRQELRDYASWNLSVNLYTVNAPWLFSLLWCAGVPSVTSDNSHALSQVPSPLWIMPPDEYCLMWVTADLVSFTLIVGIFVLQKWRLGGIRSYNPEQIMLSAAVRRTSRDVSIMKEKLIFSEISDGVEVSDVLSVCSDNSYDTYANSTATPVGPRGGGSHTKTLIERSGR

SEQ ID NO: 14 - protein, 433 aa, Homo sapiens
  source 1..433: note = sp|P48165|CXA8_HUMAN Gap junction alpha-8 protein; OS = Homo sapiens OX=9606 GN=GJA8 PE=1 SV=3
MGDWSFLGNILEEVNEHSTVIGRVWLTVLFIFRILILGTAAEFVWGDEQSDFVCNTQQPGCENVCYDEAFPISHIRLWVLQIIFVSTPSLMYVGHAVHYVRMEEKRKSREAEELGQQAGTNGGPDQGSVKKSSGSKGTKKFRLEGTLLRTYICHIIFKTLFEVGFIVGHYFLYGFRILPLYRCSRWPCPNVVDCFVSRPTEKTIFILFMLSVASVSLFLNVMELGHLGLKGIRSALKRPVEQPLGEIPEKSLHSIAVSSIQKAKGYQLLEEEKIVSHYFPLTEVGMVETSPLPAKPFNQFEEKISTGPLGDLSRGYQETLPSYAQVGAQEVEGEGPPAEEGAEPEVGEKKEEAERLTTEEQEKVAVPEGEKVETPGVDKEGEKEEPQSEKVSKQGLPAEKTPSLCPELTTDDARPLSRLSKASSRARSDDLTV

SEQ ID NO: 15 - protein, 632 aa, Homo sapiens
  source 1..632: note = sp|Q9H201|EPN3_HUMAN Epsin-3 OS=Homo sapiens OX=9606; GN = EPN3 PE=2 SV=1
MTTSALRRQVKNIVHNYSEAEIKVREATSNDPWGPPSSLMSEIADLTFNTVAFTEVMGMLWRRLNDSGKNWRHVYKALTLLDYLLKTGSERVAHQCRENLYTIQTLKDFQYIDRDGKDQGVNVREKVKQVMALLKDEERLRQERTHALKTKERMALEGIGIGSGQLGFSRRYGEDYSRSRGSPSSYNSSSSSPRYTSDLEQARPQTSGEEELQLQLALAMSREEAEKPVPPASHRDEDLQLQLALRLSRQEHEKEVRSWQGDGSPMANGAGAVVHHQRDREPEREERKEEEKLKTSQSSILDLADIFVPALAPPSTHCSADPWDIPGFRPNTEASGSSWGPSADPWSPIPSGTVLSRSQPWDLTPMLSSSEPWGRTPVLPAGPPTTDPWALNSPHHKLPSTGADPWGASLETSDTPGGASTFDPFAKPPESTETKEGLEQALPSGKPSSPVELDLFGDPSPSSKQNGTKEPDALDLGILGEALTQPSKEARACRTPESFLGPSASSLVNLDSLVKAPQVAKTRNPFLTGLSAPSPTNPFGAGEPGRPTLNQMRTGSPALGLAGGPVGAPLGSMTYSASLPLPLSSVPAGLTLPASVSVFPQAGAFAPQPLLPTPSSAGPRPPPPQTGTNPFL

SEQ ID NO: 16 - protein, 201 aa, Homo sapiens
  source 1..201: note = sp|P49703|ARL4D_HUMAN ADP-ribosylation factor-like protein 4D OS=Homo sapiens OX=9606 GN=ARL4D PE=1 SV=2
MGNHLTEMAPTASSFLPHFQALHVVVIGLDSAGKTSLLYRLKFKEFVQSVPTKGFNTEKIRVPLGGSRGITFQVWDVGGQEKLRPLWRSYTRRTDGLVFVVDAAEAERLEEAKVELHRISRASDNQGVPVLVLANKQDQPGALSAAEVEKRLAVRELAAATLTHVQGCSAVDGLGLQQGLERLYEMILKRKKAARGGKKRR

SEQ ID NO: 17 - protein, 688 aa, Homo sapiens
  source 1..688: note = sp|P35626|ARBK2_HUMAN Beta-adrenergic receptor kinase 2 OS=Homo sapiens OX=9606 GN=GRK3 PE=1 SV=2
MADLEAVLADVSYLMAMEKSKATPAARASKRIVLPEPSIRSVMQKYLAERNEITFDKIFNQKIGFLLFKDFCLNEINEAVPQVKFYEEIKEYEKLDNEEDRLCRSRQIYDAYIMKELLSCSHPFSKQAVEHVQSHLSKKQVTSTLFQPYIEEICESLRGDIFQKFMESDKFTRFCQWKNVELNIHLTMNEFSVHRIIGRGGFGEVYGCRKADTGKMYAMKCLDKKRIKMKQGETLALNERIMLSLVSTGDCPFIVCMTYAFHTPDKLCFILDLMNGGDLHYHLSQHGVFSEKEMRFYATEIILGLEHMHNRFVVYRDLKPANILLDEHGHARISDLGLACDFSKKKPHASVGTHGYMAPEVLQKGTAYDSSADWFSLGCMLFKLLRGHSPFRQHKTKDKHEIDRMTLTVNVELPDTFSPELKSLLEGLLQRDVSKRLGCHGGGSQEVKEHSFFKGVDWQHVYLQKYPPPLIPPRGEVNAADAFDIGSFDEEDTKGIKLLDCDQELYKNFPLVISERWQQEVTETVYEAVNADTDKIEARKRAKNKQLGHEEDYALGKDCIMHGYMLKLGNPFLTQWQRRYFYLFPNRLEWRGEGESRQNLLTMEQILSVEETQIKDKKCILFRIKGGKQFVLQCESDPEFVQWKKELNETFKEAQRLLRRAPKFLNKPRSGTVELPKPSLCHRNSNGL

SEQ ID NO: 18 - protein, 212 aa, Homo sapiens
  source 1..212: note = sp|O14653|GOSR2_HUMAN Golgi SNAP receptor complex member 2 OS=Homo sapiens OX=9606 GN=GOSR2 PE=1 SV=2
MDPLFQQTHKQVHEIQSCMGRLETADKQSVHIVENEIQASIDQIFSRLERLEILSSKEPPNKRQNARLRVDQLKYDVQHLQTALRNFQHRRHAREQQERQREELLSRTFTTNDSDTTIPMDESLQFNSSLQKVHNGMDDLILDGHNILDGLRTQRLTLKGTQKKILDIANMLGLSNTVMRLIEKRAFQDKYFMIGGMLLTCVVMFLVVQYLT

SEQ ID NO: 19 - protein, 360 aa, Homo sapiens
  source 1..360: note = sp|P34972|CNR2_HUMAN Cannabinoid receptor 2 OS=Homo sapiens OX=9606 GN=CNR2 PE=1 SV=1
MEECWVTEIANGSKDGLDSNPMKDYMILSGPQKTAVAVLCTLLGLLSALENVAVLYLILSSHQLRRKPSYLFIGSLAGADFLASVVFACSFVNFHVFHGVDSKAVFLLKIGSVTMTFTASVGSLLLTAIDRYLCLRYPPSYKALLTRGRALVTLGIMWVLSALVSYLPLMGWTCCPRPCSELFPLIPNDYLLSWLLFIAFLFSGIIYTYGHVLWKAHQHVASLSGHQDRQVPGMARMRLDVRLAKTLGLVLAVLLICWFPVLALMAHSLATTLSDQVKKAFAFCSMLCLINSMVNPVIYALRSGEIRSSAHHCLAHWKKCVRGLGSEAKEEAPRSSVTETEADGKITPWPDSRDLDLSDC

SEQ ID NO: 20 - protein, 791 aa, Homo sapiens
  source 1..791: note = sp|P49619|DGKG_HUMAN Diacylglycerol kinase gamma; OS = Homo sapiens OX=9606 GN=DGKG PE=1 SV=3
MGEERWVSLTPEEFDQLQKYSEYSSKKIKDALTEFNEGGSLKQYDPHEPISYDVFKLFMRAYLEVDLPQPLSTHLFLAFSQKPRHETSDHPTEGASNSEANSADTNIQNADNATKADEACAPDTESNMAEKQAPAEDQVAATPLEPPVPRSSSSESPVVYLKDVVCYLSLLETGRPQDKLEFMFRLYDSDENGLLDQAEMDCIVNQMLHIAQYLEWDPTELRPILKEMLQGMDYDRDGFVSLQEWVHGGMTTIPLLVLLGMDDSGSKGDGRHAWTMKHFKKPTYCNFCHIMLMGVRKQGLCCTYCKYTVHERCVSRNIPGCVKTYSKAKRSGEVMQHAWVEGNSSVKCDRCHKSIKCYQSVTARHCVWCRMTFHRKCELSTLCDGGELRDHILLPTSICPITRDRPGEKSDGCVSAKGELVMQYKIIPTPGTHPLLVLVNPKSGGRQGERILRKFHYLLNPKQVFNLDNGGPTPGLNFFRDTPDFRVLACGGDGTVGWILDCIDKANFAKHPPVAVLPLGTGNDLARCLRWGGGYEGGSLTKILKDIEQSPLVMLDRWHLEVIPREEVENGDQVPYSIMNNYFSIGVDASIAHRFHVMREKHPEKFNSRMKNKLWYFEFGTSETFAATCKKLHDHIELECDGVGVDLSNIFLEGIAILNIPSMYGGTNLWGENKKNRAVIRESRKGVTDPKELKFCVQDLSDQLLEVVGLEGAMEMGQIYTGLKSAGRRLAQCASVTIRTNKLLPMQVDGEPWMQPCCTIKITHKNQAPMMMGPPQKSSFFSLRRKSRSKD

SEQ ID NO: 21 - protein, 4599 aa, Homo sapiens
  source 1..4599: note = sp|Q9NZR2|LRP1B_HUMAN Low-density lipoprotein receptor-related protein 1B OS=Homo sapiens OX=9606; GN = LRP1B PE=1 SV=2
MSEFLLALLTLSGLLPIARVLTVGADRDQQLCDPGEFLCHDHVTCVSQSWLCDGDPDCPDDSDESLDTCPEEVEIKCPLNHIACLGTNKCVHLSQLCNGVLDCPDGYDEGVHCQELLSNCQQLNCQYKCTMVRNSTRCYCEDGFEITEDGRSCKDQDECAVYGTCSQTCRNTHGSYTCSCVEGYLMQPDNRSCKAKIEPTDRPPILLIANFETIEVFYLNGSKMATLSSVNGNEIHTLDFIYNEDMICWIESRESSNQLKCIQITKAGGLTDEWTINILQSFHNVQQMAIDWLTRNLYFVDHVGDRIFVCNSNGSVCVTLIDLELHNPKAIAVDPIAGKLFFTDYGNVAKVERCDMDGMNRTRIIDSKTEQPAALALDLVNKLVYWVDLYLDYVGVVDYQGKNRHTVIQGRQVRHLYGITVFEDYLYATNSDNYNIVRINRFNGTDIHSLIKIENAWGIRIYQKRTQPTVRSHACEVDPYGMPGGCSHICLLSSSYKTRTCRCRTGFNLGSDGRSCKRPKNELFLFYGKGRPGIVRGMDLNTKIADEYMIPIENLVNPRALDFHAETNYIYFADTTSFLIGRQKIDGTERETILKDDLDNVEGIAVDWIGNNLYWTNDGHRKTINVARLEKASQSRKTLLEGEMSHPRGIVVDPVNGWMYWTDWEEDEIDDSVGRIEKAWMDGFNRQIFVTSKMLWPNGLTLDFHTNTLYWCDAYYDHIEKVFLNGTHRKIVYSGRELNHPFGLSHHGNYVFWTDYMNGSIFQLDLITSEVTLLRHERPPLFGLQIYDPRKQQGDNMCRVNNGGCSTLCLAIPGGRVCACADNQLLDENGTTCTFNPGEALPHICKAGEFRCKNRHCIQARWKCDGDDDCLDGSDEDSVNCFNHSCPDDQFKCQNNRCIPKRWLCDGANDCGSNEDESNQTCTARTCQVDQFSCGNGRCIPRAWLCDREDDCGDQTDEMASCEFPTCEPLTQFVCKSGRCISSKWHCDSDDDCGDGSDEVGCVHSCFDNQFRCSSGRCIPGHWACDGDNDCGDFSDEAQINCTKEEIHSPAGCNGNEFQCHPDGNCVPDLWRCDGEKDCEDGSDEKGCNGTIRLCDHKTKFSCWSTGRCINKAWVCDGDIDCEDQSDEDDCDSFLCGPPKHPCANDTSVCLQPEKLCNGKKDCPDGSDEGYLCDECSLNNGGCSNHCSVVPGRGIVCSCPEGLQLNKDNKTCEIVDYCSNHLKCSQVCEQHKHTVKCSCYEGWKLDVDGESCTSVDPFEAFIIFSIRHEIRRIDLHKRDYSLLVPGLRNTIALDFHFNQSLLYWTDVVEDRIYRGKLSESGGVSAIEVVVEHGLATPEGLTVDWIAGNIYWIDSNLDQIEVAKLDGSLRTTLIAGAMEHPRAIALDPRYGILFWTDWDANFPRIESASMSGAGRKTIYKDMKTGAWPNGLTVDHFEKRIVWTDARSDAIYSALYDGTNMIEIIRGHEYLSHPFAVSLYGSEVYWTDWRTNTLSKANKWTGQNVSVIQKTSAQPFDLQIYHPSRQPQAPNPCAANDGKGPCSHMCLINHNRSAACACPHLMKLSSDKKTCYEMKKFLLYARRSEIRGVDIDNPYFNFITAFTVPDIDDVTVIDFDASEERLYWTDIKTQTIKRAFINGTGLETVISRDIQSIRGLAVDWVSRNLYWISSEFDETQINVARLDGSLKTSIIHGIDKPQCLAAHPVRGKLYWTDGNTINMANMDGSNSKILFQNQKEPVGLSIDYVENKLYWISSGNGTINRCNLDGGNLEVIESMKEELTKATALTIMDKKLWWADQNLAQLGTCSKRDGRNPTILRNKTSGVVHMKVYDKEAQQGSNSCQLNNGGCSQLCLPTSETTRTCMCTVGYYLQKNRMSCQGIESFLMYSVHEGIRGIPLEPSDKMDALMPISGTSFAVGIDFHAENDTIYWTDMGFNKISRAKRDQTWKEDIITNGLGRVEGIAVDWIAGNIYWTDHGFNLIEVARLNGSFRYVIISQGLDQPRSIAVHPEKGLLFWTEWGQMPCIGKARLDGSEKVVLVSMGIAWPNGISIDYEENKLYWCDARTDKIERIDLETGGNREMVLSGSNVDMFSVAVFGAYIYWSDRAHANGSVRRGHKNDATETITMRTGLGVNLKEVKIFNRVREKGTNVCARDNGGCKQLCLYRGNSRRTCACAHGYLAEDGVTCLRHEGYLLYSGRTILKSIHLSDETNLNSPIRPYENPRYFKNVIALAFDYNQRRKGTNRIFYSDAHFGNIQLIKDNWEDRQVIVENVGSVEGLAYHRAWDTLYWTSSTTSSITRHTVDQTRPGAFDREAVITMSEDDHPHVLALDECQNLMFWTNWNEQHPSIMRSTLTGKNAQVVVSTDILTPNGLTIDYRAEKLYFSDGSLGKIERCEYDGSQRHVIVKSGPGTFLSLAVYDNYIFWSDWGRRAILRSNKYTGGDTKILRSDIPHQPMGIIAVANDTNSCELSPCALLNGGCHDLCLLTPNGRVNCSCRGDRILLEDNRCVTKNSSCNAYSEFECGNGECIDYQLTCDGIPHCKDKSDEKLLYCENRSCRRGFKPCYNRRCIPHGKLCDGENDCGDNSDELDCKVSTCATVEFRCADGTCIPRSARCNQNIDCADASDEKNCNNTDCTHFYKLGVKTTGFIRCNSTSLCVLPTWICDGSNDCGDYSDELKCPVQNKHKCEENYFSCPSGRCILNTWICDGQKDCEDGRDEFHCDSSCSWNQFACSAQKCISKHWICDGEDDCGDGLDESDSICGAITCAADMFSCQGSRACVPRHWLCDGERDCPDGSDELSTAGCAPNNTCDENAFMCHNKVCIPKQFVCDHDDDCGDGSDESPQCGYRQCGTEEFSCADGRCLLNTQWQCDGDFDCPDHSDEAPLNPKCKSAEQSCNSSFFMCKNGRCIPSGGLCDNKDDCGDGSDERNCHINECLSKKVSGCSQDCQDLPVSYKCKCWPGFQLKDDGKTCVDIDECSSGFPCSQQCINTYGTYKCLCTDGYEIQPDNPNGCKSLSDEEPFLILADHHEIRKISTDGSNYTLLKQGLNNVIAIDFDYREEFIYWIDSSRPNGSRINRMCLNGSDIKVVHNTAVPNALAVDWIGKNLYWSDTEKRIIEVSKLNGLYPTILVSKRLKFPRDLSLDPQAGYLYWIDCCEYPHIGRVGMDGTNQSVVIETKISRPMALTIDYVNRRLYWADENHIEFSNMDGSHRHKVPNQDIPGVIALTLFEDYIYWTDGKTKSLSRAHKTSGADRLSLIYSWHAITDIQVYHSYRQPDVSKHLCMINNGGCSHLCLLAPGKTHTCACPTNFYLAADNRTCLSNCTASQFRCKTDKCIPFWWKCDTVDDCGDGSDEPDDCPEFRCQPGRFQCGTGLCALPAFICDGENDCGDNSDELNCDTHVCLSGQFKCTKNQKCIPVNLRCNGQDDCGDEEDERDCPENSCSPDYFQCKTTKHCISKLWVCDEDPDCADASDEANCDKKTCGPHEFQCKNNNCIPDHWRCDSQNDCSDNSDEENCKPQTCTLKDFLCANGDCVSSRFWCDGDFDCADGSDERNCETSCSKDQFRCSNGQCIPAKWKCDGHEDCKYGEDEKSCEPASPTCSSREYICASDGCISASLKCNGEYDCADGSDEMDCVTECKEDQFRCKNKAHCIPIRWLCDGIHDCVDGSDEENCERGGNICRADEFLCNNSLCKLHFWVCDGEDDCGDNSDEAPDMCVKFLCPSTRPHRCRNNRICLQSEQMCNGIDECGDNSDEDHCGGKLTYKARPCKKDEFACSNKKCIPMDLQCDRLDDCGDGSDEQGCRIAPTEYTCEDNVNPCGDDAYCNQIKTSVFCRCKPGFQRNMKNRQCEDLNECLVFGTCSHQCINVEGSYKCVCDQNFQERNNTCIAEGSEDQVLYIANDTDILGFIYPFNYSGDHQQISHIEHNSRITGMDVYYQRDMIIWSTQFNPGGIFYKRIHGREKRQANSGLICPEFKRPRDIAVDWVAGNIYWTDHSRMHWFSYYTTHWTSLRYSINVGQLNGPNCTRLLTNMAGEPYAIAVNPKRGMMYWTVVGDHSHIEEAAMDGTLRRILVQKNLQRPTGLAVDYFSERIYWADFELSIIGSVLYDGSNSVVSVSSKQGLLHPHRIDIFEDYIYGAGPKNGVFRVQKFGHGSVEYLALNIDKTKGVLISHRYKQLDLPNPCLDLACEFLCLLNPSGATCVCPEGKYLINGTCNDDSLLDDSCKLTCENGGRCILNEKGDLRCHCWPSYSGERCEVNHCSNYCQNGGTCVPSVLGRPTCSCALGFTGPNCGKTVCEDFCQNGGTCIVTAGNQPYCHCQPEYTGDRCQYYVCHHYCVNSESCTIGDDGSVECVCPTRYEGPKCEVDKCVRCHGGHCIINKDSEDIFCNCTNGKIASSCQLCDGYCYNGGTCQLDPETNVPVCLCSTNWSGTQCERPAPKSSKSDHISTRSIAIIVPLVLLVTLITTLVIGLVLCKRKRRTKTIRRQPIINGGINVEIGNPSYNMYEVDHDHNDGGLLDPGFMIDPTKARYIGGGPSAFKLPHTAPPIYLNSDLKGPLTAGPTNYSNPVYAKLYMDGQNCRNSLGSVDERKELLPKKIEIGIRETVA

SEQ ID NO: 22 - protein, 962 aa, Homo sapiens
  source 1..962: note = sp|O00192|ARVC_HUMAN Armadillo repeat protein deleted in velo-cardio-facial syndrome OS=Homo sapiens; OX = 9606 GN=ARVCF PE=1 SV=1
MEDCNVHSAASILASVKEQEARFERLTRALEQERRHVALQLERAQQPGMVSGGMGSGQPLPMAWQQLVLQEQSPGSQASLATMPEAPDVLEETVTVEEDPGTPTSHVSIVTSEDGTTRRTETKVTKTVKTVTTRTVRQVPVGPDGLPLLDGGPPLGPFADGALDRHFLLRGGGPVATLSRAYLSSGGGFPEGPEPRDSPSYGSLSRGLGMRPPRAGPLGPGPGDGCFTLPGHREAFPVGPEPGPPGGRSLPERFQAEPYGLEDDTRSLAADDEGGPELEPDYGTATRRRPECGRGLHTRAYEDTADDGGELADERPAFPMVTAPLAQPERGSMGSLDRLVRRSPSVDSARKEPRWRDPELPEVLAMLRHPVDPVKANAAAYLQHLCFENEGVKRRVRQLRGLPLLVALLDHPRAEVRRRACGALRNLSYGRDTDNKAAIRDCGGVPALVRLLRAARDNEVRELVTGTLWNLSSYEPLKMVIIDHGLQTLTHEVIVPHSGWEREPNEDSKPRDAEWTTVFKNTSGCLRNVSSDGAEARRRLRECEGLVDALLHALQSAVGRKDTDNKSVENCVCIMRNLSYHVHKEVPGADRYQEAEPGPLGSAVGSQRRRRDDASCFGGKKAKEEWFHQGKKDGEMDRNFDTLDLPKRTEAAKGFELLYQPEVVRLYLSLLTESRNFNTLEAAAGALQNLSAGNWMWATYIRATVRKERGLPVLVELLQSETDKVVRAVAIALRNLSLDRRNKDLIGSYAMAELVRNVRNAQAPPRPGACLEEDTVVAVLNTIHEIVSDSLDNARSLLQARGVPALVALVASSQSVREAKAASHVLQTVWSYKELRGTLQKDGWTKARFQSAAATAKGPKGALSPGGFDDSTLPLVDKSLEGEKTGSRDVIPMDALGPDGYSTVDRRERRPRGASSAGEASEKEPLKLDPSRKAPPPGPSRPAVRLVDAVGDAKPQPVDSWV

SEQ ID NO: 23 - protein, 785 aa, Homo sapiens
  source 1..785: note = sp|Q8NDB2|BANK1_HUMAN B-cell scaffold protein with ankyrin repeats OS=Homo sapiens OX=9606 GN=BANK1 PE=1 SV=3
MLPAAPGKGLGSPDPAPCGPAPPGNTKDIIMIYEEDAEEWALYLTEVFLHVVKREAILLYRLENFSFRHLELLNLTSYKCKLLILSNSLLRDLTPKKCQFLEKILHSPKSVVTLLCGVKSSDQLYELLNISQSRWEISTEQEPEDYISVIQSIIFKDSEDYFEVNIPTDLRAKHSGEISERKEIEELSEASRNTIPLAVVLPTEIPCENPGEIFIILRDEVIGDTVEVEFTSSNKRIRTRPALWNKKVWCMKALEFPAGSVHVNVYCDGIVKATTKIKYYPTAKAKECLFRMADSGESLCQNSIEELDGVLTSIFKHEIPYYEFQSLQTEICSQNKYTHFKELPTLLHCAAKFGLKNLAIHLLQCSGATWASKMKNMEGSDPAHIAERHGHKELKKIFEDFSIQEIDINNEQENDYEEDIASFSTYIPSTQNPAFHHESRKTYGQSADGAEANEMEGEGKQNGSGMETKHSPLEVGSESSEDQYDDLYVFIPGADPENNSQEPLMSSRPPLPPPRPVANAFQLERPHFTLPGTMVEGQMERSQNWGHPGVRQETGDEPKGEKEKKEEEKEQEEEEDPYTFAEIDDSEYDMILANLSIKKKTGSRSFIINRPPAPTPRPTSIPPKEETTPYIAQVFQQKTARRQSDDDKFCGLPKKQDRARIESPAFSTLRGCLTDGQEELILLQEKVKNGKMSMDEALEKFKHWQMGKSGLEMIQQEKLRQLRDCIIGKRPEEENVYNKLTIVHHPGGKETAHNENKFYNVHFSNKLPARPQVEKEFGFCCKKDH

SEQ ID NO: 24 - protein, 816 aa, Homo sapiens
  source 1..816: note = sp|Q9ULQ1|TPC1_HUMAN Two pore channel protein 1; OS = Homo sapiens OX=9606 GN=TPCN1 PE=1 SV=3
MAVSLDDDVPLILTLDEGGSAPLAPSNGLGQEELPSKNGGSYAIHDSQAPSLSSGGESSPSSPAHNWEMNYQEAAIYLQEGENNDKFFTHPKDAKALAAYLFAHNHLFYLMELATALLLLLLSLCEAPAVPALRLGIYVHATLELFALMVVVFELCMKLRWLGLHTFIRHKRTMVKTSVLVVQFVEAIVVLVRQMSHVRVTRALRCIFLVDCRYCGGVRRNLRQIFQSLPPFMDILLLLLFFMIIFAILGFYLFSPNPSDPYFSTLENSIVSLFVLLTTANFPDVMMPSYSRNPWSCVFFIVYLSIELYFIMNLLLAVVFDTFNDIEKRKFKSLLLHKRTAIQHAYRLLISQRRPAGISYRQFEGLMRFYKPRMSARERYLTFKALNQNNTPLLSLKDFYDIYEVAALKWKAKKNREHWFDELPRTALLIFKGINILVKSKAFQYFMYLVVAVNGVWILVETFMLKGGNFFSKHVPWSYLVFLTIYGVELFLKVAGLGPVEYLSSGWNLFDFSVTVFAFLGLLALALNMEPFYFIVVLRPLQLLRLFKLKERYRNVLDTMFELLPRMASLGLTLLIFYYSFAIVGMEFFCGIVFPNCCNTSTVADAYRWRNHTVGNRTVVEEGYYYLNNFDNILNSFVTLFELTVVNNWYIIMEGVTSQTSHWSRLYFMTFYIVTMVVMTIIVAFILEAFVFRMNYSRKNQDSEVDGGITLEKEISKEELVAVLELYREARGASSDVTRLLETLSQMERYQQHSMVFLGRRSRTKSDLSLKMYQEEIQEWYEEHAREQEQQRQLSSSAAPAAQQPPGSRQRSQTVT

SEQ ID NO: 25 - protein, 991 aa, Homo sapiens
  source 1..991: note = sp|O94762|RECQ5_HUMAN ATP-dependent DNA helicase Q5; OS = Homo sapiens OX=9606 GN=RECQL5 PE=1 SV=2
MSSHHTTFPFDPERRVRSTLKKVFGFDSFKTPLQESATMAVVKGNKDVFVCMPTGAGKSLCYQLPALLAKGITIVVSPLIALIQDQVDHLLTLKVRVSSLNSKLSAQERKELLADLEREKPQTKILYITPEMAASSSFQPTLNSLVSRHLLSYLVVDEAHCVSQWGHDFRPDYLRLGALRSRLGHAPCVALTATATPQVQEDVFAALHLKKPVAIFKTPCFRANLFYDVQFKELISDPYGNLKDFCLKALGQEADKGLSGCGIVYCRTREACEQLAIELSCRGVNAKAYHAGLKASERTLVQNDWMEEKVPVIVATISFGMGVDKANVRFVAHWNIAKSMAGYYQESGRAGRDGKPSWCRLYYSRNDRDQVSFLIRKEVAKLQEKRGNKASDKATIMAFDALVTFCEELGCRHAAIAKYFGDALPACAKGCDHCQNPTAVRRRLEALERSSSWSKTCIGPSQGNGFDPELYEGGRKGYGDFSRYDEGSGGSGDEGRDEAHKREWNLFYQKQMQLRKGKDPKIEEFVPPDENCPLKEASSRRIPRLTVKAREHCLRLLEEALSSNRQSTRTADEADLRAKAVELEHETFRNAKVANLYKASVLKKVADIHRASKDGQPYDMGGSAKSCSAQAEPPEPNEYDIPPASHVYSLKPKRVGAGFPKGSCPFQTATELMETTRIREQAPQPERGGEHEPPSRPCGLLDEDGSEPLPGPRGEVPGGSAHYGGPSPEKKAKSSSGGSSLAKGRASKKQQLLATAAHKDSQSIARFFCRRVESPALLASAPEAEGACPSCEGVQGPPMAPEKYTGEEDGAGGHSPAPPQTEECLRERPSTCPPRDQGTPEVQPTPAKDTWKGKRPRSQQENPESQPQKRPRPSAKPSVVAEVKGSVSASEQGTLNPTAQDPFQLSAPGVSLKEAANVVVKCLTPFYKEGKFASKELFKGFARHLSHLLTQKTSPGRSVKEEAQNLIRHFFHGRARCESEADWHGLCGPQR

SEQ ID NO: 26 - protein, 753 aa, Homo sapiens
  source 1..753: note = sp|P29120|NEC1_HUMAN Neuroendocrine convertase 1; OS = Homo sapiens OX=9606 GN=PCSK1 PE=1 SV=2
MERRAWSLQCTAFVLFCAWCALNSAKAKRQFVNEWAAEIPGGPEAASAIAEELGYDLLGQIGSLENHYLFKHKNHPRRSRRSAFHITKRLSDDDRVIWAEQQYEKERSKRSALRDSALNLFNDPMWNQQWYLQDTRMTAALPKLDLHVIPVWQKGITGKGVVITVLDDGLEWNHTDIYANYDPEASYDFNDNDHDPFPRYDPTNENKHGTRCAGEIAMQANNHKCGVGVAYNSKVGGIRMLDGIVTDAIEASSIGFNPGHVDIYSASWGPNDDGKTVEGPGRLAQKAFEYGVKQGRQGKGSIFVWASGNGGRQGDNCDCDGYTDSIYTISISSASQQGLSPWYAEKCSSTLATSYSSGDYTDQRITSADLHNDCTETHTGTSASAPLAAGIFALALEANPNLTWRDMQHLVVWTSEYDPLANNPGWKKNGAGLMVNSRFGFGLLNAKALVDLADPRTWRSVPEKKECVVKDNDFEPRALKANGEVIIEIPTRACEGQENAIKSLEHVQFEATIEYSRRGDLHVTLTSAAGTSTVLLAERERDTSPNGFKNWDFMSVHTWGENPIGTWTLRITDMSGRIQNEGRIVNWKLILHGTSSQPEHMKQPRVYTSYNTVQNDRRGVEKMVDPGEEQPTQENPKENTLVSKSPSSSSVGGRRDELEEGAPSQAMLRLLQSAFSKNSPPKQSPKKSPSAKLNIPYENFYEALEKLNKPSQLKDSEDSLYNDYVDVFYNTKPYKHRDDRLLQALVDILNEEN

SEQ ID NO: 27 - protein, 277 aa, Homo sapiens
  source 1..277: note = sp|Q16854|DGUOK_HUMAN Deoxyguanosine kinase, mitochondrial OS=Homo sapiens OX=9606 GN=DGUOK PE=1 SV=2
MAAGRLFLSRLRAPFSSMAKSPLEGVSSSRGLHAGRGPRRLSIEGNIAVGKSTFVKLLTKTYPEWHVATEPVATWQNIQAAGTQKACTAQSLGNLLDMMYREPARWSYTFQTFSFLSRLKVQLEPFPEKLLQARKPVQIFERSVYSDRYIFAKNLFENGSLSDIEWHIYQDWHSFLLWEFASRITLHGFIYLQASPQVCLKRLYQRAREEEKGIELAYLEQLHGQHEAWLIHKTTKLHFEALMNIPVLVLDVNDDFSEEVTKQEDLMREVNTFVKNL

SEQ ID NO: 28 - protein, 484 aa, Homo sapiens
  source 1..484: note = sp|P49759|CLK1_HUMAN Dual specificity protein kinase CLK1 OS=Homo sapiens OX=9606 GN=CLK1 PE=1 SV=2
MRHSKRTYCPDWDDKDWDYGKWRSSSSHKRRKRSHSSAQENKRCKYNHSKMCDSHYLESRSINEKDYHSRRYIDEYRNDYTQGCEPGHRQRDHESRYQNHSSKSSGRSGRSSYKSKHRIHHSTSHRRSHGKSHRRKRTRSVEDDEEGHLICQSGDVLSARYEIVDTLGEGAFGKVVECIDHKAGGRHVAVKIVKNVDRYCEAARSEIQVLEHLNTTDPNSTFRCVQMLEWFEHHGHICIVFELLGLSTYDFIKENGFLPFRLDHIRKMAYQICKSVNFLHSNKLTHTDLKPENILFVQSDYTEAYNPKIKRDERTLINPDIKVVDFGSATYDDEHHSTLVSTRHYRAPEVILALGWSQPCDVWSIGCILIEYYLGFTVFPTHDSKEHLAMMERILGPLPKHMIQKTRKRKYFHHDRLDWDEHSSAGRYVSRRCKPLKEFMLSQDVEHERLFDLIQKMLEYDPAKRITLREALKHPFFDLLKKSI

SEQ ID NO: 29 - protein, 507 aa, Homo sapiens
  source 1..507: note = sp|P51513|NOVA1_HUMAN RNA-binding protein Nova-1; OS = Homo sapiens OX=9606 GN=NOVA1 PE=1 SV=2
MMAAAPIQQNGTHTGVPIDLDPPDSRKRPLEAPPEAGSTKRTNTGEDGQYFLKVLIPSYAAGSIIGKGGQTIVQLQKETGATIKLSKSKDFYPGTTERVCLIQGTVEALNAVHGFIAEKIREMPQNVAKTEPVSILQPQTTVNPDRIKQTLPSSPTTTKSSPSDPMTTSRANQVKIIVPNSTAGLIIGKGGATVKAVMEQSGAWVQLSQKPDGINLQERVVTVSGEPEQNRKAVELIIQKIQEDPQSGSCLNISYANVTGPVANSNPTGSPYANTAEVLPTAAAAAGLLGHANLAGVAAFPAVLSGFTGNDLVAITSALNTLASYGYNLNTLGLGLSQAAATGALAAAAASANPAAAAANLLATYASEASASGSTAGGTAGTFALGSLAAATAATNGYFGAASPLAASAILGTEKSTDGSKDVVEIAVPENLVGAILGKGGKTLVEYQELTGARIQISKKGEFVPGTRNRKVTITGTPAATQAAQYLITQRITYEQGVRAANPQKVG

SEQ ID NO: 30 - protein, 639 aa, Homo sapiens
  source 1..639: note = sp|Q06495|NPT2A_HUMAN Sodium-dependent phosphate transport protein 2A OS=Homo sapiens OX=9606 GN=SLC34A1; PE = 1 SV=1
MLSYGERLGSPAVSPLPVRGGHVMRGTAFAYVPSPQVLHRIPGTSAYAFPSLGPVALAEHTCPCGEVLERHEPLPAKLALEEEQKPESRLVPKLRQAGAMLLKVPLMLTFLYLFVCSLDMLSSAFQLAGGKVAGDIFKDNAILSNPVAGLVVGILVTVLVQSSSTSTSIIVSMVSSGLLEVSSAIPIIMGSNIGTSVTNTIVALMQAGDRTDFRRAFAGATVHDCFNWLSVLVLLPLEAATGYLHHITRLVVASFNIHGGRDAPDLLKIITEPFTKLIIQLDESVITSIATGDESLRNHSLIQIWCHPDSLQAPTSMSRAEANSSQTLGNATMEKCNHIFVDTGLPDLAVGLILLAGSLVLLCTCLILLVKMLNSLLKGQVAKVIQKVINTDFPAPFTWVTGYFAMVVGASMTFVVQSSSVFTSAITPLIGLGVISIERAYPLTLGSNIGTTTTAILAALASPREKLSSAFQIALCHFFFNISGILLWYPVPCTRLPIRMAKALGKRTAKYRWFAVLYLLVCFLLLPSLVFGISMAGWQVMVGVGTPFGALLAFVVLINVLQSRSPGHLPKWLQTWDFLPRWMHSLKPLDHLITRATLCCARPEPRSPPLPPRVFLEELPPATPSPRLALPAHHNATRL

SEQ ID NO: 31 - protein, 270 aa, Homo sapiens
  source 1..270: note = sp|Q99967|CITE2_HUMAN Cbp/p300-interacting transactivator 2 OS=Homo sapiens OX=9606 GN=CITED2 PE=1; SV = 2
MADHMMAMNHGRFPDGTNGLHHHPAHRMGMGQFPSPHHHQQQQPQHAFNALMGEHIHYGAGNMNATSGIRHAMGPGTVNGGHPPSALAPAARFNNSQFMGPPVASQGGSLPASMQLQKLNNQYFNHHPYPHNHYMPDLHPAAGHQMNGTNQHFRDCNPKHSGGSSTPGGSGGSSTPGGSGSSSGGGAGSSNSGGGSGSGNMPASVAHVPAAMLPPNVIDTDFIDEEVLMSLVIEMGLDRIKELPELWLGQNEFDFMTDFVCKQQPSRVSC

SEQ ID NO: 32 - protein, 312 aa, Homo sapiens
  source 1..312: note = sp|Q08830|FGL1_HUMAN Fibrinogen-like protein 1; OS = Homo sapiens OX=9606 GN=FGL1 PE=1 SV=3
MAKVFSFILVTTALTMGREISALEDCAQEQMRLRAQVRLLETRVKQQQVKIKQLLQENEVQFLDKGDENTVIDLGSKRQYADCSEIFNDGYKLSGFYKIKPLQSPAEFSVYCDMSDGGGWTVIQRRSDGSENFNRGWKDYENGFGNFVQKHGEYWLGNKNLHFLTTQEDYTLKIDLADFEKNSRYAQYKNFKVGDEKNFYELNIGEYSGTAGDSLAGNFHPEVQWWASHQRMKFSTWDRDHDNYEGNCAEEDQSGWWFNRCHSANLNGVYYSGPYTAKTDNGIVWYTWHGWWYSLKSVVMKIRPNDFIPNVI

SEQ ID NO: 33 - protein, 460 aa, Homo sapiens
  source 1..460: note = sp|P11229|ACM1_HUMAN Muscarinic acetylcholine receptor M1 OS=Homo sapiens OX=9606 GN=CHRM1 PE=1 SV=2
MNTSAPPAVSPNITVLAPGKGPWQVAFIGITTGLLSLATVTGNLLVLISFKVNTELKTVNNYFLLSLACADLIIGTFSMNLYTTYLLMGHWALGTLACDLWLALDYVASNASVMNLLLISFDRYFSVTRPLSYRAKRTPRRAALMIGLAWLVSFVLWAPAILFWQYLVGERTVLAGQCYIQFLSQPIITFGTAMAAFYLPVTVMCTLYWRIYRETENRARELAALQGSETPGKGGGSSSSSERSQPGAEGSPETPPGRCCRCCRAPRLLQAYSWKEEEEEDEGSMESLTSSEGEEPGSEVVIKMPMVDPEAQAPTKQPPRSSPNTVKRPTKKGRDRAGKGQKPRGKEQLAKRKTFSLVKEKKAARTLSAILLAFILTWTPYNIMVLVSTFCKDCVPETLWELGYWLCYVNSTINPMCYALCNKAFRDTFRLLLLCRWDKRRWRKIPKRPGSVHRTPSRQC

SEQ ID NO: 34 - protein, 682 aa, Homo sapiens
  source 1..682: note = sp|P17020|ZNF16_HUMAN Zinc finger protein 16 OS=Homo sapiens OX=9606 GN=ZNF16 PE=1 SV=3
MPSLRTRREEAEMELSVPGPSPWTPAAQARVRDAPAVTHPGSAACGTPCCSDTELEAICPHYQQPDCDTRTEDKEFLHKEDIHEDLESQAEISENYAGDVSQVPELGDLCDDVSERDWGVPEGRRLPQSLSQEGDFTPAAMGLLRGPLGEKDLDCNGFDSRFSLSPNLMACQEIPTEERPHPYDMGGQSFQHSVDLTGHEGVPTAESPLICNECGKTFQGNPDLIQRQIVHTGEASFMCDDCGKTFSQNSVLKNRHRSHMSEKAYQCSECGKAFRGHSDFSRHQSHHSSERPYMCNECGKAFSQNSSLKKHQKSHMSEKPYECNECGKAFRRSSNLIQHQRIHSGEKPYVCSECGKAFRRSSNLIKHHRTHTGEKPFECGECGKAFSQSAHLRKHQRVHTGEKPYECNDCGKPFSRVSNLIKHHRVHTGEKPYKCSDCGKAFSQSSSLIQHRRIHTGEKPHVCNVCGKAFSYSSVLRKHQIIHTGEKPYRCSVCGKAFSHSSALIQHQGVHTGDKPYACHECGKTFGRSSNLILHQRVHTGEKPYECTECGKTFSQSSTLIQHQRIHNGLKPHECNQCGKAFNRSSNLIHHQKVHTGEKPYTCVECGKGFSQSSHLIQHQIIHTGERPYKCSECGKAFSQRSVLIQHQRIHTGVKPYDCAACGKAFSQRSKLIKHQLIHTRE

SEQ ID NO: 35 - protein, 527 aa, Homo sapiens
  source 1..527: note = sp|O95747|OXSR1_HUMAN Serine/threonine-protein kinase OSR1 OS=Homo sapiens OX=9606 GN=OXSR1 PE=1 SV=1
MSEDSSALPWSINRDDYELQEVIGSGATAVVQAAYCAPKKEKVAIKRINLEKCQTSMDELLKEIQAMSQCHHPNIVSYYTSFVVKDELWLVMKLLSGGSVLDIIKHIVAKGEHKSGVLDESTIATILREVLEGLEYLHKNGQIHRDVKAGNILLGEDGSVQIADFGVSAFLATGGDITRNKVRKTFVGTPCWMAPEVMEQVRGYDFKADIWSFGITAIELATGAAPYHKYPPMKVLMLTLQNDPPSLETGVQDKEMLKKYGKSFRKMISLCLQKDPEKRPTAAELLRHKFFQKAKNKEFLQEKTLQRAPTISERAKKVRRVPGSSGRLHKTEDGGWEWSDDEFDEESEEGKAAISQLRSPRVKESISNSELFPTTDPVGTLLQVPEQISAHLPQPAGQIATQPTQVSLPPTAEPAKTAQALSSGSGSQETKIPISLVLRLRNSKKELNDIRFEFTPGRDTAEGVSQELISAGLVDGRDLVIVAANLQKIVEEPQSNRSVTFKLASGVEGSDIPDDGKLIGFAQLSIS

SEQ ID NO: 36 - protein, 688 aa, Homo sapiens
  source 1..688: note = sp|P10074|TZAP_HUMAN Telomere zinc finger-associated protein OS=Homo sapiens OX=9606 GN=ZBTB48 PE=1 SV=2
MDGSFVQHSVRVLQELNKQREKGQYCDATLDVGGLVFKAHWSVLACCSHFFQSLYGDGSGGSVVLPAGFAEIFGLLLDFFYTGHLALTSGNRDQVLLAARELRVPEAVELCQSFKPKTSVGQAAGGQSGLGPPASQNVNSHVKEPAGLEEEEVSRTLGLVPRDQEPRGSHSPQRPQLHSPAQSEGPSSLCGKLKQALKPCPLEDKKPEDCKVPPRPLEAEGAQLQGGSNEWEVVVQVEDDGDGDYMSEPEAVLTRRKSNVIRKPCAAEPALSAGSLAAEPAENRKGTAVPVECPTCHKKFLSKYYLKVHNRKHTGEKPFECPKCGKCYFRKENLLEHEARNCMNRSEQVFTCSVCQETFRRRMELRVHMVSHTGEMPYKCSSCSQQFMQKKDLQSHMIKLHGAPKPHACPTCAKCFLSRTELQLHEAFKHRGEKLFVCEECGHRASSRNGLQMHIKAKHRNERPHVCEFCSHAFTQKANLNMHLRTHTGEKPFQCHLCGKTFRTQASLDKHNRTHTGERPFSCEFCEQRFTEKGPLLRHVASRHQEGRPHFCQICGKTFKAVEQLRVHVRRHKGVRKFECTECGYKFTRQAHLRRHMEIHDRVENYNPRQRKLRNLIIEDEKMVVVALQPPAELEVGSAEVIVESLAQGGLASQLPGQRLCAEESFTGPGVLEPSLIITAAVPEDCDT

SEQ ID NO: 37 - protein, 299 aa, Homo sapiens [sequence omitted]

SEQ ID NO: 38 - protein, 781 aa, Homo sapiens
  source 1..781: note = sp|Q9UIU6|SIX4_HUMAN Homeobox protein SIX4 OS=Homo sapiens OX=9606 GN=SIX4 PE=1 SV=2
MSSSSPTGQIASAADIKQENGMESASEGQEAHREVAGGAAVGLSPPAPAPFPLEPGDAATAAARVSGEEGAVAAAAAGAAADQVQLHSELLGRHHHAAAAAAQTPLAFSPDHVACVCEALQQGGNLDRLARFLWSLPQSDLLRGNESLLKARALVAFHQGIYPELYSILESHSFESANHPLLQQLWYKARYTEAERARGRPLGAVDKYRLRRKFPLPRTIWDGEETVYCFKEKSRNALKELYKQNRYPSPAEKRHLAKITGLSLTQVSNWFKNRRQRDRNPSETQSKSESDGNPSTEDESSKGHEDLSPHPLSSSSDGITNLSLSSHMEPVYMQQIGNAKISLSSSGVLLNGSLVPASTSPVFLNGNSFIQGPSGVILNGLNVGNTQAVALNPPKMSSNIVSNGISMTDILGSTSQDVKEFKVLQSSANSATTTSYSPSVPVSFPGLIPSTEVKREGIQTVASQDGGSVVTFTTPVQINQYGIVQIPNSGANSQFLNGSIGFSPLQLPPVSVAASQGNISVSSSTSDGSTFTSESTTVQQGKVFLSSLAPSAVVYTVPNTGQTIGSVKQEGLERSLVFSQLMPVNQNAQVNANLSSENISGSGLHPLASSLVNVSPTHNFSLSPSTLLNPTELNRDIADSQPMSAPVASKSTVTSVSNTNYATLQNCSLITGQDLLSVPMTQAALGEIVPTAEDQVGHPSPAVHQDFVQEHRLVLQSVANMKENFLSNSESKATSSLMMLDSKSKYVLDGMVDTVCEDLETDKKELAKLQTVQLDEDMQDL

SEQ ID NO: 39 - protein, 280 aa, Homo sapiens
  source 1..280: note = sp|Q13643|FHL3_HUMAN Four and a half LIM domains protein 3 OS=Homo sapiens OX=9606 GN=FHL3 PE=1 SV=4
MSESFDCAKCNESLYGRKYIQTDSGPYCVPCYDNTFANTCAECQQLIGHDSRELFYEDRHFHEGCFRCCRCQRSLADEPFTCQDSELLCNDCYCSAFSSQCSACGETVMPGSRKLEYGGQTWHEHCFLCSGCEQPLGSRSFVPDKGAHYCVPCYENKFAPRCARCSKTLTQGGVTYRDQPWHRECLVCTGCQTPLAGQQFTSRDEDPYCVACFGELFAPKCSSCKRPIVGLGGGKYVSFEDRHWHHNCFSCARCSTSLVGQGFVPDGDQVLCQGCSQAGP

SEQ ID NO: 40 - protein, 94 aa, Homo sapiens
  source 1..94: note = sp|Q92583|CCL17_HUMAN C-C motif chemokine 17 OS=Homo sapiens OX=9606 GN=CCL17 PE=1 SV=1
MAPLKMLALVTLLLGASLQHIHAARGTNVGRECCLEYFKGAIPLRKLKTWYQTSEDCSRDAIVFVTVQGRAICSDPNNKRVKNAVKYLQSLERS

SEQ ID NO: 41 - protein, 1238 aa, Homo sapiens
  source 1..1238: note = sp|Q9Y219|JAG2_HUMAN Protein jagged-2 OS=Homo sapiens OX=9606 GN=JAG2 PE=1 SV=3
MRAQGRGRLPRRLLLLLALWVQAARPMGYFELQLSALRNVNGELLSGACCDGDGRTTRAGGCGHDECDTYVRVCLKEYQAKVTPTGPCSYGHGATPVLGGNSFYLPPAGAAGDRARARARAGGDQDPGLVVIPFQFAWPRSFTLIVEAWDWDNDTTPNEELLIERVSHAGMINPEDRWKSLHFSGHVAHLELQIRVRCDENYYSATCNKFCRPRNDFFGHYTCDQYGNKACMDGWMGKECKEAVCKQGCNLLHGGCTVPGECRCSYGWQGRFCDECVPYPGCVHGSCVEPWQCNCETNWGGLLCDKDLNYCGSHHPCTNGGTCINAEPDQYRCTCPDGYSGRNCEKAEHACTSNPCANGGSCHEVPSGFECHCPSGWSGPTCALDIDECASNPCAAGGTCVDQVDGFECICPEQWVGATCQLDANECEGKPCLNAFSCKNLIGGYYCDCIPGWKGINCHINVNDCRGQCQHGGTCKDLVNGYQCVCPRGFGGRHCELERDECASSPCHSGGLCEDLADGFHCHCPQGFSGPLCEVDVDLCEPSPCRNGARCYNLEGDYYCACPDDFGGKNCSVPREPCPGGACRVIDGCGSDAGPGMPGTAASGVCGPHGRCVSQPGGNFSCICDSGFTGTYCHENIDDCLGQPCRNGGTCIDEVDAFRCFCPSGWEGELCDTNPNDCLPDPCHSRGRCYDLVNDFYCACDDGWKGKTCHSREFQCDAYTCSNGGTCYDSGDTFRCACPPGWKGSTCAVAKNSSCLPNPCVNGGTCVGSGASFSCICRDGWEGRTCTHNTNDCNPLPCYNGGICVDGVNWFRCECAPGFAGPDCRINIDECQSSPCAYGATCVDEINGYRCSCPPGRAGPRCQEVIGFGRSCWSRGTPFPHGSSWVEDCNSCRCLDGRRDCSKVWCGWKPCLLAGQPEALSAQCPLGQRCLEKAPGQCLRPPCEAWGECGAEEPPSTPCLPRSGHLDNNCARLTLHFNRDHVPQGTTVGAICSGIRSLPATRAVARDRLLVLLCDRASSGASAVEVAVSFSPARDLPDSSLIQGAAHAIVAAITQRGNSSLLLAVTEVKVETVVTGGSSTGLLVPVLCGAFSVLWLACVVLCVWWTRKRRKERERSRLPREESANNQWAPLNPIRNPIERPGGHKDVLYQCKNFTPPPRRADEALPGPAGHAAVREDEEDEDLGRGEEDSLEAEKFLSHKFTKDPGRSPGRPAHWASGPKVDNRAVRSINEARYAGKE

SEQ ID NO: 42 - protein, 729 aa, Homo sapiens
  source 1..729: note = sp|Q96S59|RANB9_HUMAN Ran-binding protein 9 OS=Homo sapiens OX=9606 GN=RANBP9 PE=1 SV=1
MSGQPPPPPPQQQQQQQQLSPPPPAALAPVSGVVLPAPPAVSAGSSPAGSPGGGAGGEGLGAAAAALLLHPPPPPPPATAAPPPPPPPPPPPASAAAPASGPPAPPGLAAGPGPAGGAPTPALVAGSSAAAPFPHGDSALNEQEKELQRRLKRLYPAVDEQETPLPRSWSPKDKFSYIGLSQNNLRVHYKGHGKTPKDAASVRATHPIPAACGIYYFEVKIVSKGRDGYMGIGLSAQGVNMNRLPGWDKHSYGYHGDDGHSFCSSGTGQPYGPTFTTGDVIGCCVNLINNTCFYTKNGHSLGIAFTDLPPNLYPTVGLQTPGEVVDANFGQHPFVFDIEDYMREWRTKIQAQIDRFPIGDREGEWQTMIQKMVSSYLVHHGYCATAEAFARSTDQTVLEELASIKNRQRIQKLVLAGRMGEAIETTQQLYPSLLERNPNLLFTLKVRQFIEMVNGTDSEVRCLGGRSPKSQDSYPVSPRPFSSPSMSPSHGMNIHNLASGKGSTAHFSGFESCSNGVISNKAHQSYCHSNKHQSSNLNVPELNSINMSRSQQVNNFTSNDVDMETDHYSNGVGETSSNGFLNGSSKHDHEMEDCDTEMEVDSSQLRRQLCGGSQAAIERMIHFGRELQAMSEQLRRDCGKNTANKKMLKDAFSLLAYSDPWNSPVGNQLDPIQREPVCSALNSAILETHNLPKQPPLALAMGQATQCLGLMARSGIGSCAFATVEDYLH

SEQ ID NO: 43 - protein, 986 aa, Homo sapiens
  source 1..986: note = sp|Q92974|ARHG2_HUMAN Rho guanine nucleotide exchange factor 2 OS=Homo sapiens OX=9606 GN=ARHGEF2 PE=1; SV = 4
MSRIESLTRARIDRSRELASKTREKEKMKEAKDARYTNGHLFTTISVSGMTMCYACNKSITAKEALICPTCNVTIHNRCKDTLANCTKVKQKQQKAALLKNNTALQSVSLRSKTTIRERPSSAIYPSDSFRQSLLGSRRGRSSLSLAKSVSTTNIAGHFNDESPLGLRRILSQSTDSLNMRNRTLSVESLIDEAEVIYSELMSDFEMDEKDFAADSWSLAVDSSFLQQHKKEVMKQQDVIYELIQTELHHVRTLKIMTRLFRTGMLEELHLEPGVVQGLFPCVDELSDIHTRFLSQLLERRRQALCPGSTRNFVIHRLGDLLISQFSGPSAEQMCKTYSEFCSRHSKALKLYKELYARDKRFQQFIRKVTRPAVLKRHGVQECILLVTQRITKYPLLISRILQHSHGIEEERQDLTTALGLVKELLSNVDEGIYQLEKGARLQEIYNRMDPRAQTPVPGKGPFGREELLRRKLIHDGCLLWKTATGRFKDVLVLLMTDVLVFLQEKDQKYIFPTLDKPSVVSLQNLIVRDIANQEKGMFLISAAPPEMYEVHTASRDDRSTWIRVIQQSVRTCPSREDFPLIETEDEAYLRRIKMELQQKDRALVELLREKVGLFAEMTHFQAEEDGGSGMALPTLPRGLFRSESLESPRGERLLQDAIREVEGLKDLLVGPGVELLLTPREPALPLEPDSGGNTSPGVTANGEARTFNGSIELCRADSDSSQRDRNGNQLRSPQEEALQRLVNLYGLLHGLQAAVAQQDTLMEARFPEGPERREKLCRANSRDGEAGRAGAAPVAPEKQATELALLQRQHALLQEELRRCRRLGEERATEAGSLEARLRESEQARALLEREAEEARRQLAALGQTEPLPAEAPWARRPVDPRRRSLPAGDALYLSFNPPQPSRGTDRLDLPVTTRSVHRNFEDRERQELGSPEERLQDSSDPDTGSEEEGSSRLSPPHSPRDFTRMQDIPEETESRDGEAVASES

SEQ ID NO: 44 - protein, 636 aa, Homo sapiens
  source 1..636: note = sp|Q8TF47|ZFP90_HUMAN Zinc finger protein 90 homolog; OS = Homo sapiens OX=9606 GN=ZFP90 PE=1 SV=2
MAPRPPTAAPQESVTFKDVSVDFTQEEWYHVDPAQRSLYRDVMLENYSHLVSLGYQVSKPEVIFKLEQGEEPWISEGEIQRPFYPDWKTRPEVKSSHLQQDVSEVSHCTHDLLHATLEDSWDVSSQLDRQQENWKRHLGSEASTQKKIITPQENFEQNKFGENSRLNTNLVTQLNIPARIRPSECETLGSNLGHNADLLNENNILAKKKPYKCDKCRKAFIHRSSLTKHEKTHKGEGAFPNGTDQGIYPGKKHHECTDCGKTFLWKTQLTEHQRIHTGEKPFECNVCGKAFRHSSSLGQHENAHTGEKPYQCSLCGKAFQRSSSLVQHQRIHTGEKPYRCNLCGRSFRHGTSLTQHEVTHSGEKPFQCKECGKAFSRCSSLVQHERTHTGEKPFECSICGRAFGQSPSLYKHMRIHKRGKPYQSSNYSIDFKHSTSLTQDESTLTEVKSYHCNDCGEDFSHITDFTDHQRIHTAENPYDCEQAFSQQAISHPGEKPYQCNVCGKAFKRSTSFIEHHRIHTGEKPYECNECGEAFSRRSSLTQHERTHTGEKPYECIDCGKAFSQSSSLIQHERTHTGEKPYECNECGRAFRKKTNLHDHQRIHTGEKPYSCKECGKNFSRSSALTKHQRIHTRNKL

SEQ ID NO: 45 - protein, 387 aa, Homo sapiens
  source 1..387: note = sp|Q16816|PHKG1_HUMAN Phosphorylase b kinase gamma catalytic chain, skeletal muscle/heart isoform OS=Homo sapiens OX=9606 GN=PHKG1 PE=2 SV=3
MTRDEALPDSHSAQDFYENYEPKEILGRGVSSVVRRCIHKPTSQEYAVKVIDVTGGGSFSPEEVRELREATLKEVDILRKVSGHPNIIQLKDTYETNTFFFLVFDLMKRGELFDYLTEKVTLSEKETRKIMRALLEVICTLHKLNIVHRDLKPENILLDDNMNIKLTDFGFSCQLEPGERLREVCGTPSYLAPEIIECSMNEDHPGYGKEVDMWSTGVIMYTLLAGSPPFWHRKQMLMLRMIMSGNYQFGSPEWDDYSDTVKDLVSRFLVVQPQNRYTAEEALAHPFFQQYLVEEVRHFSPRGKFKVIALTVLASVRIYYQYRRVKPVTREIVIRDPYALRPLRRLIDAYAFRIYGHWVKKGQQQNRAALFENTPKAVLLSLAEEDY

SEQ ID NO: 46 - protein, 1052 aa, Homo sapiens
  source 1..1052: note = sp|Q9Y4C4|MFHA1_HUMAN Malignant fibrous histiocytoma-amplified sequence 1 OS=Homo sapiens OX=9606; GN = MFHAS1 PE=1 SV=2
MAGMDSGNLKTARLWRDAALRARKLRSNLRQLTLTAAGACPGAGADALESPASPQLVLPANLGDIEALNLGNNGLEEVPEGLGSALGSLRVLVLRRNRFARLPPAVAELGHHLTELDVSHNRLTALGAEVVSALRELRKLNLSHNQLPALPAQLGALAHLEELDVSFNRLAHLPDSLSCLSRLRTLDVDHNQLTAFPRQLLQLVALEELDVSSNRLRGLPEDISALRALKILWLSGAELGTLPAGFCELASLESLMLDNNGLQALPAQFSCLQRLKMLNLSSNLFEEFPAALLPLAGLEELYLSRNQLTSVPSLISGLGRLLTLWLDNNRIRYLPDSIVELTGLEELVLQGNQIAVLPDHFGQLSRVGLWKIKDNPLIQPPYEVCMKGIPYIAAYQKELAHSQPAVQPRLKLLLMGHKAAGKTLLRHCLTEERVEGCPGGGDKEKCYPPSPPPVSKGIEVTSWTADASRGLRFIVYDLAGDESYEVIQPFFLSPGALYVLVVNLATYEPRHFPTTVGSFLHRVGARVPHAVVCIVGTHADLCGERELEEKCLDIHRQIALQEKHDAEGLSRLAKVVDEALARDFELRSASPHAAYYGVSDKNLRRRKAHFQYLLNHRLQILSPVLPVSCRDPRHLRRLRDKLLSVAEHREIFPNLHRVLPRSWQVLEELHFQPPQAQRLWLSWWDSARLGLQAGLTEDRLQSALSYLHESGKLLYFEDSPALKEHVFHNLTRLIDILNVFFQRDPSLLLHKLLLGTSGEGKAEGESSPPMARSTPSQELLRATQLHQYVEGFLLHGLLPAHVIRLLLKPHVQAQQDLQLLLELLEKMGLCYCLNKPKGKPLNGSTAWYKFPCYVQNEVPHAEAWINGTNLAGQSFVAEQLQIEYSFPFTFPLGLFARYSVQINSHVVHRSDGKFQIFAYRGKVPVVVSYRPARGVLQPDTLSIASHASLPNIWTAWQAITPLVEELNVLLQEWPGLHYTVHILCSKCLKRGSPNPHAFPGELLSQPRPEGVAEIICPKNGSERVNVALVYPPTPTVISPCSKKNVGEKHRNQ

SEQ ID NO: 47 - protein, 1838 aa, Homo sapiens
  source 1..1838: note = sp|P20908|CO5A1_HUMAN Collagen alpha-1(V) chain; OS = Homo sapiens OX=9606 GN=COL5A1 PE=1 SV=3
MDVHTRWKARSALRPGAPLLPPLLLLLLWAPPPSRAAQPADLLKVLDFHNLPDGITKTTGFCATRRSSKGPDVAYRVTKDAQLSAPTKQLYPASAFPEDFSILTTVKAKKGSQAFLVSIYNEQGIQQIGLELGRSPVFLYEDHTGKPGPEDYPLFRGINLSDGKWHRIALSVHKKNVTLILDCKKKTTKFLDRSDHPMIDINGIIVFGTRILDEEVFEGDIQQLLFVSDHRAAYDYCEHYSPDCDTAVPDTPQSQDPNPDEYYTEGDGEGETYYYEYPYYEDPEDLGKEPTPSKKPVEAAKETTEVPEELTPTPTEAAPMPETSEGAGKEEDVGIGDYDYVPSEDYYTPSPYDDLTYGEGEENPDQPTDPGAGAEIPTSTADTSNSSNPAPPPGEGADDLEGEFTEETIRNLDENYYDPYYDPTSSPSEIGPGMPANQDTIYEGIGGPRGEKGQKGEPAIIEPGMLIEGPPGPEGPAGLPGPPGTMGPTGQVGDPGERGPPGRPGLPGADGLPGPPGTMLMLPFRFGGGGDAGSKGPMVSAQESQAQAILQQARLALRGPAGPMGLTGRPGPVGPPGSGGLKGEPGDVGPQGPRGVQGPPGPAGKPGRRGRAGSDGARGMPGQTGPKGDRGFDGLAGLPGEKGHRGDPGPSGPPGPPGDDGERGDDGEVGPRGLPGEPGPRGLLGPKGPPGPPGPPGVTGMDGQPGPKGNVGPQGEPGPPGQQGNPGAQGLPGPQGAIGPPGEKGPLGKPGLPGMPGADGPPGHPGKEGPPGEKGGQGPPGPQGPIGYPGPRGVKGADGIRGLKGTKGEKGEDGFPGFKGDMGIKGDRGEIGPPGPRGEDGPEGPKGRGGPNGDPGPLGPPGEKGKLGVPGLPGYPGRQGPKGSIGFPGFPGANGEKGGRGTPGKPGPRGQRGPTGPRGERGPRGITGKPGPKGNSGGDGPAGPPGERGPNGPQGPTGFPGPKGPPGPPGKDGLPGHPGQRGETGFQGKTGPPGPPGVVGPQGPTGETGPMGERGHPGPPGPPGEQGLPGLAGKEGTKGDPGPAGLPGKDGPPGLRGFPGDRGLPGPVGALGLKGNEGPPGPPGPAGSPGERGPAGAAGPIGIPGRPGPQGPPGPAGEKGAPGEKGPQGPAGRDGLQGPVGLPGPAGPVGPPGEDGDKGEIGEPGQKGSKGDKGEQGPPGPTGPQGPIGQPGPSGADGEPGPRGQQGLFGQKGDEGPRGFPGPPGPVGLQGLPGPPGEKGETGDVGQMGPPGPPGPRGPSGAPGADGPQGPPGGIGNPGAVGEKGEPGEAGEPGLPGEGGPPGPKGERGEKGESGPSGAAGPPGPKGPPGDDGPKGSPGPVGFPGDPGPPGEPGPAGQDGPPGDKGDDGEPGQTGSPGPTGEPGPSGPPGKRGPPGPAGPEGRQGEKGAKGEAGLEGPPGKTGPIGPQGAPGKPGPDGLRGIPGPVGEQGLPGSPGPDGPPGPMGPPGLPGLKGDSGPKGEKGHPGLIGLIGPPGEQGEKGDRGLPGPQGSSGPKGEQGITGPSGPIGPPGPPGLPGPPGPKGAKGSSGPTGPKGEAGHPGPPGPPGPPGEVIQPLPIQASRTRRNIDASQLLDDGNGENYVDYADGMEEIFGSLNSLKLEIEQMKRPLGTQQNPARTCKDLQLCHPDFPDGEYWVDPNQGCSRDSFKVYCNFTAGGSTCVFPDKKSEGARITSWPKENPGSWFSEFKRGKLLSYVDAEGNPVGVVQMTFLRLLSASAHQNVTYHCYQSVAWQDAATGSYDKALRFLGSNDEEMSYDNNPYIRALVDGCATKKGYQKTVLEIDTPKVEQVPIVDIMFNDFGEASQKFGFEVGPACFMG

SEQ ID NO: 48 - protein, 131 aa, Homo sapiens
  source 1..131: note = sp|O15243|OBRG_HUMAN Leptin receptor gene-related protein OS=Homo sapiens OX=9606 GN=LEPROT PE=1 SV=1
MAGVKALVALSFSGAIGLTFLMLGCALEDYGVYWPLFVLIFHAISPIPHFIAKRVTYDSDATSSACRELAYFFTTGIVVSAFGFPVILARVAVIKWGACGLVLAGNAVIFLTIQGFFLIFGRGDDFSWEQW

SEQ ID NO: 49 - protein, 367 aa, Homo sapiens
  source 1..367: note = sp|P06132|DCUP_HUMAN Uroporphyrinogen decarboxylase; OS = Homo sapiens OX=9606 GN=UROD PE=1 SV=2
MEANGLGPQGFPELKNDTFLRAAWGEETDYTPVWCMRQAGRYLPEFRETRAAQDFFSTCRSPEACCELTLQPLRRFPLDAAIIFSDILVVPQALGMEVTMVPGKGPSFPEPLREEQDLERLRDPEVVASELGYVFQAITLTRQRLAGRVPLIGFAGAPWTLMTYMVEGGGSSTMAQAKRWLYQRPQASHQLLRILTDALVPYLVGQVVAGAQALQLFESHAGHLGPQLFNKFALPYIRDVAKQVKARLREAGLAPVPMIIFAKDGHFALEELAQAGYEVVGLDWTVAPKKARECVGKTVTLQGNLDPCALYASEEEIGQLVKQMLDDFGPHRYIANLGHGLYPDMDPEHVGAFVDAVHKHSRLLRQN

SEQ ID NO: 50 - protein, 1460 aa, Homo sapiens
  source 1..1460: note = sp|Q96Q04|LMTK3_HUMAN Serine/threonine-protein kinase LMTK3 OS=Homo sapiens OX=9606 GN=LMTK3 PE=1 SV=2
MPAPGALILLAAVSASGCLASPAHPDGFALGRAPLAPPYAVVLISCSGLLAFIFLLLTCLCCKRGDVGFKEFENPEGEDCSGEYTPPAEETSSSQSLPDVYILPLAEVSLPMPAPQPSHSDMTTPLGLSRQHLSYLQEIGSGWFGKVILGEIFSDYTPAQVVVKELRASAGPLEQRKFISEAQPYRSLQHPNVLQCLGLCVETLPFLLIMEFCQLGDLKRYLRAQRPPEGLSPELPPRDLRTLQRMGLEIARGLAHLHSHNYVHSDLALRNCLLTSDLTVRIGDYGLAHSNYKEDYYLTPERLWIPLRWAAPELLGELHGTFMVVDQSRESNIWSLGVTLWELFEFGAQPYRHLSDEEVLAFVVRQQHVKLARPRLKLPYADYWYDILQSCWRPPAQRPSASDLQLQLTYLLSERPPRPPPPPPPPRDGPFPWPWPPAHSAPRPGTLSSPFPLLDGFPGADPDDVLTVTESSRGLNLECLWEKARRGAGRGGGAPAWQPASAPPAPHANPSNPFYEALSTPSVLPVISARSPSVSSEYYIRLEEHGSPPEPLFPNDWDPLDPGVPAPQAPQAPSEVPQLVSETWASPLFPAPRPFPAQSSASGSFLLSGWDPEGRGAGETLAGDPAEVLGERGTAPWVEEEEEEEEGSSPGEDSSSLGGGPSRRGPLPCPLCSREGACSCLPLERGDAVAGWGGHPALGCPHPPEDDSSLRAERGSLADLPMAPPASAPPEFLDPLMGAAAPQYPGRGPPPAPPPPPPPPRAPADPAASPDPPSAVASPGSGLSSPGPKPGDSGYETETPFSPEGAFPGGGAAEEEGVPRPRAPPEPPDPGAPRPPPDPGPLPLPGPREKPTFVVQVSTEQLLMSLREDVTRNLLGEKGATARETGPRKAGRGPGNREKVPGLNRDPTVLGNGKQAPSLSLPVNGVTVLENGDQRAPGIEEKAAENGALGSPEREEKVLENGELTPPRREEKALENGELRSPEAGEKVLVNGGLTPPKSEDKVSENGGLRFPRNTERPPETGPWRAPGPWEKTPESWGPAPTIGEPAPETSLERAPAPSAVVSSRNGGETAPGPLGPAPKNGTLEPGTERRAPETGGAPRAPGAGRLDLGSGGRAPVGTGTAPGGGPGSGVDAKAGWVDNTRPQPPPPPLPPPPEAQPRRLEPAPPRARPEVAPEGEPGAPDSRAGGDTALSGDGDPPKPERKGPEMPRLFLDLGPPQGNSEQIKARLSRLSLALPPLTLTPFPGPGPRRPPWEGADAGAAGGEAGGAGAPGPAEEDGEDEDEDEEEDEEAAAPGAAAGPRGPGRARAAPVPVVVSSADADAARPLRGLLKSPRGADEPEDSELERKRKMVSFHGDVTVYLFDQETPTNELSVQAPPEGDTDPSTPPAPPTPPHPATPGDGFPSNDSGFGGSFEWAEDFPLLPPPGPPLCFSRFSVSPALETPGPPARAPDARPAGPVEN

SEQ ID NO: 51 - protein, 365 aa, Homo sapiens
  source 1..365: note = sp|P28566|5HT1E_HUMAN 5-hydroxytryptamine receptor 1E OS=Homo sapiens OX=9606 GN=HTR1E PE=1 SV=1
MNITNCTTEASMAIRPKTITEKMLICMTLVVITTLTTLLNLAVIMAIGTTKKLHQPANYLICSLAVTDLLVAVLVMPLSIIYIVMDRWKLGYFLCEVWLSVDMTCCTCSILHLCVIALDRYWAITNAIEYARKRTAKRAALMILTVWTISIFISMPPLFWRSHRRLSPPPSQCTIQHDHVIYTIYSTLGAFYIPLTLILILYYRIYHAAKSLYQKRGSSRHLSNRSTDSQNSFASCKLTQTFCVSDFSTSDPTTEFEKFHASIRIPPFDNDLDHPGERQQISSTRERKAARILGLILGAFILSWLPFFIKELIVGLSIYTVSSEVADFLTWLGYVNSLINPLLYTSFNEDFKLAFKKLIRCREHT

SEQ ID NO: 52 - protein, 253 aa, Homo sapiens
  source 1..253: note = sp|P49862|KLK7_HUMAN Kallikrein-7 OS=Homo sapiens; OX = 9606 GN=KLK7 PE=1 SV=1
MARSLLLPLQILLLSLALETAGEEAQGDKIIDGAPCARGSHPWQVALLSGNQLHCGGVLVNERWVLTAAHCKMNEYTVHLGSDTLGDRRAQRIKASKSFRHPGYSTQTHVNDLMLVKLNSQARLSSMVKKVRLPSRCEPPGTTCTVSGWGTTTSPDVTFPSDLMCVDVKLISPQDCTKVYKDLLENSMLCAGIPDSKKNACNGDSGGPLVCRGTLQGLVSWGTFPCGQPNDPGVYTQVCKFTKWINDTMKKHR

SEQ ID NO: 53 - protein, 614 aa, Homo sapiens
  source 1..614: note = sp|P17844|DDX5_HUMAN Probable ATP-dependent RNA helicase DDX5 OS=Homo sapiens OX=9606 GN=DDX5 PE=1 SV=1
MSGYSSDRDRGRDRGFGAPRFGGSRAGPLSGKKFGNPGEKLVKKKWNLDELPKFEKNFYQEHPDLARRTAQEVETYRRSKEITVRGHNCPKPVLNFYEANFPANVMDVIARQNFTEPTAIQAQGWPVALSGLDMVGVAQTGSGKTLSYLLPAIVHINHQPFLERGDGPICLVLAPTRELAQQVQQVAAEYCRACRLKSTCIYGGAPKGPQIRDLERGVEICIATPGRLIDFLECGKTNLRRTTYLVLDEADRMLDMGFEPQIRKIVDQIRPDRQTLMWSATWPKEVRQLAEDFLKDYIHINIGALELSANHNILQIVDVCHDVEKDEKLIRLMEEIMSEKENKTIVFVETKRRCDELTRKMRRDGWPAMGIHGDKSQQERDWVLNEFKHGKAPILIATDVASRGLDVEDVKFVINYDYPNSSEDYIHRIGRTARSTKTGTAYTFFTPNNIKQVSDLISVLREANQAINPKLLQLVEDRGSGRSRGRGGMKDDRRDRYSAGKRGGFNTFRDRENYDRGYSSLLKRDFGAKTQNGVYSAANYTNGSFGSNFVSAGIQTSFRTGNPTGTYQNGYDSTQQYGSNVPNMHNGMNQQAYAYPATAAAPMIGYPMPTGYSQ

SEQ ID NO: 54 - protein, 522 aa, Homo sapiens
  source 1..522: note = sp|P34059|GALNS_HUMAN N-acetylgalactosamine-6-sulfatase OS=Homo sapiens OX=9606; GN = GALNS PE=1 SV=1
MAAVVAATRWWQLLLVLSAAGMGASGAPQPPNILLLLMDDMGWGDLGVYGEPSRETPNLDRMAAEGLLFPNFYSANPLCSPSRAALLTGRLPIRNGFYTTNAHARNAYTPQEIVGGIPDSEQLLPELLKKAGYVSKIVGKWHLGHRPQFHPLKHGFDEWFGSPNCHFGPYDNKARPNIPVYRDWEMVGRYYEEFPINLKTGEANLTQIYLQEALDFIKRQARHHPFFLYWAVDATHAPVYASKPFLGTSQRGRYGDAVREIDDSIGKILELLQDLHVADNTFVFFTSDNGAALISAPEQGGSNGPFLCGKQTTFEGGMREPALAWWPGHVTAGQVSHQLGSIMDLFTTSLALAGLTPPSDRAIDGLNLLPTLLQGRLMDRPIFYYRGDTLMAATLGQHKAHFWTWTNSWENFRQGIDFCPGQNVSGVTTHNLEDHTKLPLIFHLGRDPGERFPLSFASAEYQEALSRITSVVQQHQEALVPAQPQLNVCNWAVMNWAPPGCEKLGKCLTPPESIPKKCLWSH

SEQ ID NO: 55 - protein, 770 aa, Homo sapiens
  source 1..770: note = sp|P98082|DAB2_HUMAN Disabled homolog 2 OS=Homo sapiens OX=9606 GN=DAB2 PE=1 SV=3
MSNEVETSATNGQPDQQAAPKAPSKKEKKKGPEKTDEYLLARFKGDGVKYKAKLIGIDDVPDARGDKMSQDSMMKLKGMAAAGRSQGQHKQRIWVNISLSGIKIIDEKTGVIEHEHPVNKISFIARDVTDNRAFGYVCGGEGQHQFFAIKTGQQAEPLVVDLKDLFQVIYNVKKKEEEKKKIEEASKAVENGSEALMILDDQTNKLKSGVDQMDLFGDMSTPPDLNSPTESKDILLVDLNSEIDTNQNSLRENPFLTNGITSCSLPRPTPQASFLPENAFSANLNFFPTPNPDPFRDDPFTQPDQSTPSSFDSLKSPDQKKENSSSSSTPLSNGPLNGDVDYFGQQFDQISNRTGKQEAQAGPWPFSSSQTQPAVRTQNGVSEREQNGFSVKSSPNPFVGSPPKGLSIQNGVKQDLESSVQSSPHDSIAIIPPPQSTKPGRGRRTAKSSANDLLASDIFAPPVSEPSGQASPTGQPTALQPNPLDLFKTSAPAPVGPLVGLGGVTVTLPQAGPWNTASLVFNQSPSMAPGAMMGGQPSGFSQPVIFGTSPAVSGWNQPSPFAASTPPPVPVVWGPSASVAPNAWSTTSPLGNPFQSNIFPAPAVSTQPPSMHSSLLVTPPQPPPRAGPPKDISSDAFTALDPLGDKEIKDVKEMFKDFQLRQPPAVPARKGEQTSSGTLSAFASYFNSKVGIPQENADHDDFDANQLLNKINEPPKPAPRQVSLPVTKSTDNAFENPFFKDSFGSSQASVASSQPVSSEMYRDPFGNPFA

SEQ ID NO: 56 - protein, 542 aa, Homo sapiens
  source 1..542: note = sp|Q5TKA1|LIN9_HUMAN Protein lin-9 homolog OS=Homo sapiens OX=9606 GN=LIN9 PE=1 SV=1
MAELDQLPDESSSAKALVSLKEGSLSNTWNEKYSSLQKTPVWKGRNTSSAVEMPFRNSKRSRLFSDEDDRQINTRSPKRNQRVAMVPQKFTATMSTPDKKASQKIGFRLRNLLKLPKAHKWCIYEWFYSNIDKPLFEGDNDFCVCLKESFPNLKTRKLTRVEWGKIRRLMGKPRRCSSAFFEEERSALKQKRQKIRLLQQRKVADVSQFKDLPDEIPLPLVIGTKVTARLRGVHDGLFTGQIDAVDTLNATYRVTFDRTGLGTHTIPDYEVLSNEPHETMPIAAFGQKQRPSRFFMTPPRLHYTPPLQSPIIDNDPLLGQSPWRSKISGSDTETLGGFPVEFLIQVTRLSKILMIKKEHIKKLREMNTEAEKLKSYSMPISIEFQRRYATIVLELEQLNKDLNKVLHKVQQYCYELAPDQGLQPADQPTDMRRRCEEEAQEIVRHANSSTGQPCVENENLTDLISRLTAILLQIKCLAEGGDLNSFEFKSLTDSLNDIKSTIDASNISCFQNNVEIHVAHIQSGLSQMGNLHAFAANNTNRD

SEQ ID NO: 57 - protein, 1286 aa, Homo sapiens
  source 1..1286: note = sp|P21439|MDR3_HUMAN Phosphatidylcholine translocator ABCB4 OS=Homo sapiens OX=9606 GN=ABCB4 PE=1; SV = 2
MDLEAAKNGTAWRPTSAEGDFELGISSKQKRKKTKTVKMIGVLTLFRYSDWQDKLFMSLGTIMAIAHGSGLPLMMIVFGEMTDKFVDTAGNFSFPVNFSLSLLNPGKILEEEMTRYAYYYSGLGAGVLVAAYIQVSFWTLAAGRQIRKIRQKFFHAILRQEIGWFDINDTTELNTRLTDDISKISEGIGDKVGMFFQAVATFFAGFIVGFIRGWKLTLVIMAISPILGLSAAVWAKILSAFSDKELAAYAKAGAVAEEALGAIRTVIAFGGQNKELERYQKHLENAKEIGIKKAISANISMGIAFLLIYASYALAFWYGSTLVISKEYTIGNAMTVFFSILIGAFSVGQAAPCIDAFANARGAAYVIFDIIDNNPKIDSFSERGHKPDSIKGNLEFNDVHFSYPSRANVKILKGLNLKVQSGQTVALVGSSGCGKSTTVQLIQRLYDPDEGTINIDGQDIRNFNVNYLREIIGVVSQEPVLFSTTIAENICYGRGNVTMDEIKKAVKEANAYEFIMKLPQKFDTLVGERGAQLSGGQKQRIAIARALVRNPKILLLDEATSALDTESEAEVQAALDKAREGRTTIVIAHRLSTVRNADVIAGFEDGVIVEQGSHSELMKKEGVYFKLVNMQTSGSQIQSEEFELNDEKAATRMAPNGWKSRLFRHSTQKNLKNSQMCQKSLDVETDGLEANVPPVSFLKVLKLNKTEWPYFVVGTVCAIANGGLQPAFSVIFSEIIAIFGPGDDAVKQQKCNIFSLIFLFLGIISFFTFFLQGFTFGKAGEILTRRLRSMAFKAMLRQDMSWFDDHKNSTGALSTRLATDAAQVQGATGTRLALIAQNIANLGTGIIISFIYGWQLTLLLLAVVPIIAVSGIVEMKLLAGNAKRDKKELEAAGKIATEAIENIRTVVSLTQERKFESMYVEKLYGPYRNSVQKAHIYGITFSISQAFMYFSYAGCFRFGAYLIVNGHMRFRDVILVFSAIVFGAVALGHASSFAPDYAKAKLSAAHLFMLFERQPLIDSYSEEGLKPDKFEGNITFNEVVFNYPTRANVPVLQGLSLEVKKGQTLALVGSSGCGKSTVVQLLERFYDPLAGTVFVDFGFQLLDGQEAKKLNVQWLRAQLGIVSQEPILFDCSIAENIAYGDNSRVVSQDEIVSAAKAANIHPFIETLPHKYETRVGDKGTQLSGGQKQRIAIARALIRQPQILLLDEATSALDTESEKVVQEALDKAREGRTCIVIAHRLSTIQNADLIVVFQNGRVKEHGTHQQLLAQKGIYFSMVSVQAGTQNL

SEQ ID NO: 58 - protein, 246 aa, Homo sapiens
  source 1..246: note = sp|P60900|PSA6_HUMAN Proteasome subunit alpha type-6; OS = Homo sapiens OX=9606 GN=PSMA6 PE=1 SV=1
MSRGSSAGFDRHITIFSPEGRLYQVEYAFKAINQGGLTSVAVRGKDCAVIVTQKKVPDKLLDSSTVTHLFKITENIGCVMTGMTADSRSQVQRARYEAANWKYKYGYEIPVDMLCKRIADISQVYTQNAEMRPLGCCMILIGIDEEQGPQVYKCDPAGYYCGFKATAAGVKQTESTSFLEKKVKKKFDWTFEQTVETAITCLSTVLSIDFKPSEIEVGVVTVENPKFRILTEAEIDAHLVALAERD

SEQ ID NO: 59 - protein, 1151 aa, Homo sapiens
  source 1..1151: note = sp|O43847|NRDC_HUMAN Nardilysin OS=Homo sapiens; OX = 9606 GN=NRDC PE=1 SV=3
MLRRVTVAAVCATRRKLCEAGRELAALWGIETRGRCEDSAAARPFPILAMPGRNKAKSTCSCPDLQPNGQDLGENSRVARLGADESEEEGRRGSLSNAGDPEIVKSPSDPKQYRYIKLQNGLQALLISDLSNMEGKTGNTTDDEEEEEVEEEEEDDDEDSGAEIEDDDEEGFDDEDEFDDEHDDDLDTEDNELEELEERAEARKKTTEKQSAAALCVGVGSFADPDDLPGLAHFLEHMVFMGSLKYPDENGFDAFLKKHGGSDNASTDCERTVFQFDVQRKYFKEALDRWAQFFIHPLMIRDAIDREVEAVDSEYQLARPSDANRKEMLFGSLARPGHPMGKFFWGNAETLKHEPRKNNIDTHARLREFWMRYYSSHYMTLVVQSKETLDTLEKWVTEIFSQIPNNGLPRPNFGHLTDPFDTPAFNKLYRVVPIRKIHALTITWALPPQQQHYRVKPLHYISWLVGHEGKGSILSFLRKKCWALALFGGNGETGFEQNSTYSVFSISITLTDEGYEHFYEVAYTVFQYLKMLQKLGPEKRIFEEIRKIEDNEFHYQEQTDPVEYVENMCENMQLYPLQDILTGDQLLFEYKPEVIGEALNQLVPQKANLVLLSGANEGKCDLKEKWFGTQYSIEDIENSWAELWNSNFELNPDLHLPAENKYIATDFTLKAFDCPETEYPVKIVNTPQGCLWYKKDNKFKIPKAYIRFHLISPLIQKSAANVVLFDIFVNILTHNLAEPAYEADVAQLEYKLVAGEHGLIIRVKGFNHKLPLLFQLIIDYLAEFNSTPAVFTMITEQLKKTYFNILIKPETLAKDVRLLILEYARWSMIDKYQALMDGLSLESLLSFVKEFKSQLFVEGLVQGNVTSTESMDFLKYVVDKLNFKPLEQEMPVQFQVVELPSGHHLCKVKALNKGDANSEVTVYYQSGTRSLREYTLMELLVMHMEEPCFDFLRTKQTLGYHVYPTCRNTSGILGFSVTVGTQATKYNSEVVDKKIEEFLSSFEEKIENLTEEAFNTQVTALIKLKECEDTHLGEEVDRNWNEVVTQQYLFDRLAHEIEALKSFSKSDLVNWFKAHRGPGSKMLSVHVVGYGKYELEEDGTPSSEDSNSSCEVMQLTYLPTSPLLADCIIPITDIRAFTTTLNLLPYHKIVK

SEQ ID NO: 60 - protein, 389 aa, Homo sapiens
  source 1..389: note = sp|Q13336|UT1_HUMAN Urea transporter 1 OS=Homo sapiens OX=9606 GN=SLC14A1 PE=1 SV=2
MEDSPTMVRVDSPTMVRGENQVSPCQGRRCFPKALGYVTGDMKELANQLKDKPVVLQFIDWILRGISQVVFVNNPVSGILILVGLLVQNPWWALTGWLGTVVSTLMALLLSQDRSLIASGLYGYNATLVGVLMAVFSDKGDYFWWLLLPVCAMSMTCPIFSSALNSMLSKWDLPVFTLPFNMALSMYLSATGHYNPFFPAKLVIPITTAPNISWSDLSALELLKSIPVGVGQIYGCDNPWTGGIFLGAILLSSPLMCLHAAIGSLLGIAAGLSLSAPFEDIYFGLWGFNSSLACIAMGGMFMALTWQTHLLALGCALFTAYLGVGMANFMAEVGLPACTWPFCLATLLFLIMTTKNSNIYKMPLSKVTYPEENRIFYLQAKKRMVESPL

SEQ ID NO: 61 - protein, 462 aa, Homo sapiens
  source 1..462: note = sp|Q16649|NFIL3_HUMAN Nuclear factor interleukin-3-regulated protein OS=Homo sapiens OX=9606; GN = NFIL3 PE=1 SV=2
MQLRKMQTVKKEQASLDASSNVDKMMVLNSALTEVSEDSTTGEELLLSEGSVGKNKSSACRRKREFIPDEKKDAMYWEKRRKNNEAAKRSREKRRLNDLVLENKLIALGEENATLKAELLSLKLKFGLISSTAYAQEIQKLSNSTAVYFQDYQTSKSNVSSFVDEHEPSMVSSSCISVIKHSPQSSLSDVSEVSSVEHTQESSVQGSCRSPENKFQIIKQEPMELESYTREPRDDRGSYTASIYQNYMGNSFSGYSHSPPLLQVNRSSSNSPRTSETDDGVVGKSSDGEDEQQVPKGPIHSPVELKHVHATVVKVPEVNSSALPHKLRIKAKAMQIKVEAFDNEFEATQKLSSPIDMTSKRHFELEKHSAPSMVHSSLTPFSVQVTNIQDWSLKSEHWHQKELSGKTQNSFKTGVVEMKDSGYKVSDPENLYLKQGIANLSAEVVSLKRLIATQPISASDSG

SEQ ID NO: 62 - protein, 719 aa, Homo sapiens
  source 1..719: note = sp|Q6ZSI9|CAN12_HUMAN Calpain-12 OS=Homo sapiens; OX = 9606 GN=CAPN12 PE=2 SV=1
MASSSGRVTIQLVDEEAGVGAGRLQLFRGQSYEAIRAACLDSGILFRDPYFPAGPDALGYDQLGPDSEKAKGVKWMRPHEFCAEPKFICEDMSRTDVCQGSLGNCWFLAAAASLTLYPRLLRRVVPPGQDFQHGYAGVFHFQLWQFGRWMDVVVDDRLPVREGKLMFVRSEQRNEFWAPLLEKAYAKLHGSYEVMRGGHMNEAFVDFTGGVGEVLYLRQNSMGLFSALRHALAKESLVGATALSDRGEYRTEEGLVKGHAYSITGTHKVFLGFTKVRLLRLRNPWGCVEWTGAWSDSCPRWDTLPTECRDALLVKKEDGEFWMELRDFLLHFDTVQICSLSPEVLGPSPEGGGWHVHTFQGRWVRGFNSGGSQPNAETFWTNPQFRLTLLEPDEEDDEDEEGPWGGWGAAGARGPARGGRTPKCTVLLSLIQRNRRRLRAKGLTYLTVGFHVFQIPEELLGLWDSPRSHALLPRLLRADRSPLSARRDVTRRCCLRPGHYLVVPSTAHAGDEADFTLRVFSERRHTAVEIDDVISADLQSLQGPYLPLELGLEQLFQELAGEEEELNASQLQALLSIALEPARAHTSTPREIGLRTCEQLLQCFGHGQSLALHHFQQLWGYLLEWQAIFNKFDEDTSGTMNSYELRLALNAAGFHLNNQLTQTLTSRYRDSRLRVDFERFVSCVAHLTCIFCHCSQHLDGGEGVICLTHRQWMEVATFS

SEQ ID NO: 63 - protein, 880 aa, Homo sapiens
  source 1..880: note = sp|Q8WYR1|PI3R5_HUMAN Phosphoinositide 3-kinase regulatory subunit 5 OS=Homo sapiens OX=9606 GN=PIK3R5; PE = 1 SV=1
MQPGATTCTEDRIQHALERCLHGLSLSRRSTSWSAGLCLNCWSLQELVSRDPGHFLILLEQILQKTREVQEKGTYDLLTPLALLFYSTVLCTPHFPPDSDLLLKAASTYHRFLTWPVPYCSICQELLTFIDAELKAPGISYQRLVRAEQGLPIRSHRSSTVTVLLLNPVEVQAEFLAVANKLSTPGHSPHSAYTTLLLHAFQATFGAHCDVPGLHCRLQAKTLAELEDIFTETAEAQELASGIGDAAEARRWLRTKLQAVGEKAGFPGVLDTAKPGKLHTIPIPVARCYTYSWSQDSFDILQEILLKEQELLQPGILGDDEEEEEEEEEVEEDLETDGHCAERDSLLSTSSLASHDSTLSLASSQASGPALSRHLLTSFVSGLSDGMDSGYVEDSEESSSEWPWRRGSQERRGHRRPGQKFIRIYKLFKSTSQLVLRRDSRSLEGSSDTALPLRRAGSLCSPLDEPVSPPSRAQRSRSLPQPKLGTQLPSWLLAPASRPQRRRPFLSGDEDPKASTLRVVVFGSDRISGKVARAYSNLRRLENNRPLLTRFFKLQFFYVPVKRSHGTSPGACPPPRSQTPSPPTDSPRHASPGELGTTPWEESTNDISHYLGMLDPWYERNVLGLMHLPPEVLCQQSLKAEAQALEGSPTQLPILADMLLYYCRFAARPVLLQVYQTELTFITGEKTTEIFIHSLELGHSAATRAIKASGPGSKRLGIDGDREAVPLTLQIIYSKGAISGRSRWSNLEKVCTSVNLNKACRKQEELDSSMEALTLNLTEVVKRQNSKSKKGFNQISTSQIKVDKVQIIGSNSCPFAVCLDQDERKILQSVVRCEVSPCYKPEKSDLSSPPQTPPDLPAQAAPDLCSLLCLPIMTFSGALP

SEQ ID NO: 64 - protein, 720 aa, Homo sapiens
  source 1..720: note = sp|Q969H4|CNKR1_HUMAN Connector enhancer of kinase suppressor of ras 1 OS=Homo sapiens OX=9606 GN=CNKSR1 PE=1; SV = 1
MEPVETWTPGKVATWLRGLDDSLQDYPFEDWQLPGKNLLQLCPQSLEALAVRSLGHQELILGGVEQLQALSSRLQTENLQSLTEGLLGATHDFQSIVQGCLGDCAKTPIDVLCAAVELLHEADALLFWLSRYLFSHLNDFSACQEIRDLLEELSQVLHEDGPAAEKEGTVLRICSHVAGICHNILVCCPKELLEQKAVLEQVQLDSPLGLEIHTTSNCQHFVSQVDTQVPTDSRLQIQPGDEVVQINEQVVVREERDMVGWPRKNMVRELLREPAGLSLVLKKIPIPETPPQTPPQVLDSPHQRSPSLSLAPLSPRAPSEDVFAFDLSSNPSPGPSPAWTDSASLGPEPLPIPPEPPAILPAGVAGTPGLPESPDKSPVGRKKSKGLATRLSRRRVSCRELGRPDCDGWLLLRKAPGGFMGPRWRRRWFVLKGHTLYWYRQPQDEKAEGLINVSNYSLESGHDQKKKYVFQLTHDVYKPFIFAADTLTDLSMWVRHLITCISKYQSPGRAPPPREEDCYSETEAEDPDDEAGSHSASPSPAQAGSPLHGDTSPAATPTQRSPRTSFGSLTDSSEEALEGMVRGLRQGGVSLLGQPQPLTQEQWRSSFMRRNRDPQLNERVHRVRALQSTLKAKLQELQVLEEVLGDPELTGEKFRQWKEQNRELYSEGLGAWGVAQAEGSSHILTSDSTEQSPHSLPSDPEEHSHLCPLTSESSLRPPDL

SEQ ID NO: 65 - protein, 226 aa, Homo sapiens
  source 1..226: note = sp|O14530|TXND9_HUMAN Thioredoxin domain-containing protein 9 OS=Homo sapiens OX=9606 GN=TXNDC9 PE=1 SV=2
MEADASVDMFSKVLEHQLLQTTKLVEEHLDSEIQKLDQMDEDELERLKEKRLQALRKAQQQKQEWLSKGHGEYREIPSERDFFQEVKESENVVCHFYRDSTFRCKILDRHLAILSKKHLETKFLKLNVEKAPFLCERLHIKVIPTLALLKDGKTQDYVVGFTDLGNTDDFTTETLEWRLGSSDILNYSGNLMEPPFQNQKKFGTNFTKLEKKTIRGKKYDSDSDDD

SEQ ID NO: 66 - protein, 1117 aa, Homo sapiens
  source 1..1117: note = sp|Q9UKP5|ATS6_HUMAN A disintegrin and metalloproteinase with thrombospondin motifs 6 OS=Homo sapiens OX=9606 GN=ADAMTS6 PE=2 SV=2
MEILWKTLTWILSLIMASSEFHSDHRLSYSSQEEFLTYLEHYQLTIPIRVDQNGAFLSFTVKNDKHSRRRRSMDPIDPQQAVSKLFFKLSAYGKHFHLNLTLNTDFVSKHFTVEYWGKDGPQWKHDFLDNCHYTGYLQDQRSTTKVALSNCVGLHGVIATEDEEYFIEPLKNTTEDSKHFSYENGHPHVIYKKSALQQRHLYDHSHCGVSDFTRSGKPWWLNDTSTVSYSLPINNTHIHHRQKRSVSIERFVETLVVADKMMVGYHGRKDIEHYILSVMNIVAKLYRDSSLGNVVNIIVARLIVLTEDQPNLEINHHADKSLDSFCKWQKSILSHQSDGNTIPENGIAHHDNAVLITRYDICTYKNKPCGTLGLASVAGMCEPERSCSINEDIGLGSAFTIAHEIGHNFGMNHDGIGNSCGTKGHEAAKLMAAHITANTNPFSWSACSRDYITSFLDSGRGTCLDNEPPKRDFLYPAVAPGQVYDADEQCRFQYGATSRQCKYGEVCRELWCLSKSNRCVTNSIPAAEGTLCQTGNIEKGWCYQGDCVPFGTWPQSIDGGWGPWSLWGECSRTCGGGVSSSLRHCDSPAPSGGGKYCLGERKRYRSCNTDPCPLGSRDFREKQCADFDNMPFRGKYYNWKPYTGGGVKPCALNCLAEGYNFYTERAPAVIDGTQCNADSLDICINGECKHVGCDNILGSDAREDRCRVCGGDGSTCDAIEGFFNDSLPRGGYMEVVQIPRGSVHIEVREVAMSKNYIALKSEGDDYYINGAWTIDWPRKFDVAGTAFHYKRPTDEPESLEALGPTSENLIVMVLLQEQNLGIRYKFNVPITRTGSGDNEVGFTWNHQPWSECSATCAGGVQRQEVVCKRLDDNSIVQNNYCDPDSKPPENQRACNTEPCPPEWFIGDWLECSKTCDGGMRTRAVLCIRKIGPSEEETLDYSGCLTHRPVEKEPCNNQSCPPQWVALDWSECTPKCGPGFKHRIVLCKSSDLSKTFPAAQCPEESKPPVRIRCSLGRCPPPRWVTGDWGQCSAQCGLGQQMRTVQCLSYTGQASSDCLETVRPPSMQQCESKCDSTPISNTEECKDVNKVAYCPLVLKFKFCSRAYFRQMCCKTCQGH

SEQ ID NO: 67 - protein, 577 aa, Homo sapiens
  source 1..577: note = sp|Q8TF68|ZN384_HUMAN Zinc finger protein 384; OS = Homo sapiens OX=9606 GN=ZNF384 PE=1 SV=2
MEESHFNSNPYFWPSIPTVSGQIENTMFINKMKDQLLPEKGCGLAPPHYPTLLTVPASVSLPSGISMDTESKSDQLTPHSQASVTQNITVVPVPSTGLMTAGVSCSQRWRREGSQSRGPGLVITSPSGSLVTTASSAQTFPISAPMIVSALPPGSQALQVVPDLSKKVASTLTEEGGGGGGGGGSVAPKPPRGRKKKRMLESGLPEMNDPYVLSPEDDDDHQKDGKTYRCRMCSLTFYSKSEMQIHSKSHTETKPHKCPHCSKTFANSSYLAQHIRIHSGAKPYSCNFCEKSFRQLSHLQQHTRIHSKMHTETIKPHKCPHCSKTFANTSYLAQHLRIHSGAKPYNCSYCQKAFRQLSHLQQHTRIHTGDRPYKCAHPGCEKAFTQLSNLQSHRRQHNKDKPFKCHNCHRAYTDAASLEVHLSTHTVKHAKVYTCTICSRAYTSETYLMKHMRKHNPPDLQQQVQAAAAAAAVAQAQAQAQAQAQAQAQAQAQAQASQASQQQQQQQQQQQQQQQQPPPHFQSPGAAPQGGGGGDSNPNPPPQCSFDLTPYKTAEHHKDICLTVTTSTIQVEHLASS

SEQ ID NO: 68 - protein, 345 aa, Homo sapiens
  source 1..345: note = sp|P46597|ASMT_HUMAN Acetylserotonin O-methyltransferase OS=Homo sapiens OX=9606 GN=ASMT PE=1; SV = 1
MGSSEDQAYRLLNDYANGFMVSQVLFAACELGVFDLLAEAPGPLDVAAVAAGVRASAHGTELLLDICVSLKLLKVETRGGKAFYRNTELSSDYLTTVSPTSQCSMLKYMGRTSYRCWGHLADAVREGRNQYLETFGVPAEELFTAIYRSEGERLQFMQALQEVWSVNGRSVLTAFDLSVFPLMCDLGGGAGALAKECMSLYPGCKITVFDIPEVVWTAKQHFSFQEEEQIDFQEGDFFKDPLPEADLYILARVLHDWADGKCSHLLERIYHTCKPGGGILVIESLLDEDRRGPLLTQLYSLNMLVQTEGQERTPTHYHMLLSSAGFRDFQFKKTGAIYDAILARK

SEQ ID NO: 69 - protein, 855 aa, Homo sapiens
  source 1..855: note = sp|Q16832|DDR2_HUMAN Discoidin domain-containing receptor 2 OS=Homo sapiens OX=9606 GN=DDR2 PE=1 SV=2
MILIPRMLLVLFLLLPILSSAKAQVNPAICRYPLGMSGGQIPDEDITASSQWSESTAAKYGRLDSEEGDGAWCPEIPVEPDDLKEFLQIDLHTLHFITLVGTQGRHAGGHGIEFAPMYKINYSRDGTRWISWRNRHGKQVLDGNSNPYDIFLKDLEPPIVARFVRFIPVTDHSMNVCMRVELYGCVWLDGLVSYNAPAGQQFVLPGGSIIYLNDSVYDGAVGYSMTEGLGQLTDGVSGLDDFTQTHEYHVWPGYDYVGWRNESATNGYIEIMFEFDRIRNFTTMKVHCNNMFAKGVKIFKEVQCYFRSEASEWEPNAISFPLVLDDVNPSARFVTVPLHHRMASAIKCQYHFADTWMMFSEITFQSDAAMYNNSEALPTSPMAPTTYDPMLKVDDSNTRILIGCLVAIIFILLAIIVIILWRQFWQKMLEKASRRMLDDEMTVSLSLPSDSSMFNNNRSSSPSEQGSNSTYDRIFPLRPDYQEPSRLIRKLPEFAPGEEESGCSGVVKPVQPSGPEGVPHYAEADIVNLQGVTGGNTYSVPAVTMDLLSGKDVAVEEFPRKLLTFKEKLGEGQFGEVHLCEVEGMEKFKDKDFALDVSANQPVLVAVKMLRADANKNARNDFLKEIKIMSRLKDPNIIHLLAVCITDDPLCMITEYMENGDLNQFLSRHEPPNSSSSDVRTVSYTNLKFMATQIASGMKYLSSLNFVHRDLATRNCLVGKNYTIKIADFGMSRNLYSGDYYRIQGRAVLPIRWMSWESILLGKFTTASDVWAFGVTLWETFTFCQEQPYSQLSDEQVIENTGEFFRDQGRQTYLPQPAICPDSVYKLMLSCWRRDTKNRPSFQEIHLLLLQQGDE

SEQ ID NO: 70 - protein, 838 aa, Homo sapiens
  source 1..838: note = sp|Q9NRZ9|HELLS_HUMAN Lymphoid-specific helicase; OS = Homo sapiens OX=9606 GN=HELLS PE=1 SV=1
MPAERPAGSGGSEAPAMVEQLDTAVITPAMLEEEEQLEAAGLERERKMLEKARMSWDRESTEIRYRRLQHLLEKSNIYSKFLLTKMEQQQLEEQKKKEKLERKKESLKVKKGKNSIDASEEKPVMRKKRGREDESYNISEVMSKEEILSVAKKNKKENEDENSSSTNLCVEDLQKNKDSNSIIKDRLSETVRQNTKFFFDPVRKCNGQPVPFQQPKHFTGGVMRWYQVEGMEWLRMLWENGINGILADEMGLGKTVQCIATIALMIQRGVPGPFLVCGPLSTLPNWMAEFKRFTPDIPTMLYHGTQEERQKLVRNIYKRKGTLQIHPVVITSFEIAMRDRNALQHCYWKYLIVDEGHRIKNMKCRLIRELKRFNADNKLLLTGTPLQNNLSELWSLLNFLLPDVFDDLKSFESWFDITSLSETAEDIIAKEREQNVLHMLHQILTPFLLRRLKSDVALEVPPKREVVVYAPLSKKQEIFYTAIVNRTIANMFGSSEKETIELSPTGRPKRRTRKSINYSKIDDFPNELEKLISQIQPEVDRERAVVEVNIPVESEVNLKLQNIMMLLRKCCNHPYLIEYPIDPVTQEFKIDEELVTNSGKFLILDRMLPELKKRGHKVLLFSQMTSMLDILMDYCHLRDFNFSRLDGSMSYSEREKNMHSFNTDPEVFIFLVSTRAGGLGINLTAADTVIIYDSDWNPQSDLQAQDRCHRIGQTKPVVVYRLVTANTIDQKIVERAAAKRKLEKLIIHKNHFKGGQSGLNLSKNFLDPKELMELLKSRDYEREIKGSREKVISDKDLELLLDRSDLIDQMNASGPIKEKMGIFKILENSEDSSPECLF

SEQ ID NO: 71 - protein, 486 aa, Homo sapiens
  source 1..486: note = sp|Q86UX6|ST32C_HUMAN Serine/threonine-protein kinase 32C OS=Homo sapiens OX=9606 GN=STK32C PE=1 SV=1
MRSGAERRGSSAAASPGSPPPGRARPAGSDAPSALPPPAAGQPRARDSGDVRSQPRPLFQWSKWKKRMGSSMSAATARRPVFDDKEDVNFDHFQILRAIGKGSFGKVCIVQKRDTEKMYAMKYMNKQQCIERDEVRNVFRELEILQEIEHVFLVNLWYSFQDEEDMFMVVDLLLGGDLRYHLQQNVQFSEDTVRLYICEMALALDYLRGQHIIHRDVKPDNILLDERGHAHLTDFNIATIIKDGERATALAGTKPYMAPEIFHSFVNGGTGYSFEVDWWSVGVMAYELLRGWRPYDIHSSNAVESLVQLFSTVSVQYVPTWSKEMVALLRKLLTVNPEHRLSSLQDVQAAPALAGVLWDHLSEKRVEPGFVPNKGRLHCDPTFELEEMILESRPLHKKKKRLAKNKSRDNSRDSSQSENDYLQDCLDAIQQDFVIFNREKLKRSQDLPREPLPAPESRDAAEPVEDEAERSALPMCGPICPSAGSG

SEQ ID NO: 72 - protein, 435 aa, Homo sapiens
  source 1..435: note = sp|P24278|ZBT25_HUMAN Zinc finger and BTB domain-containing protein 25 OS=Homo sapiens OX=9606; GN = ZBTB25 PE=1 SV=2
MDTASHSLVLLQQLNMQREFGFLCDCTVAIGDVYFKAHRAVLAAFSNYFKMIFIHQTSECIKIQPTDIQPDIFSYLLHIMYTGKGPKQIVDHSRLEEGIRFLHADYLSHIATEMNQVFSPETVQSSNLYGIQISTTQKTVVKQGLEVKEAPSSNSGNRAAVQGDHPQLQLSLAIGLDDGTADQQRACPATQALEEHQKPPVSIKQERCDPESVISQSHPSPSSEVTGPTFTENSVKIHLCHYCGERFDSRSNLRQHLHTHVSGSLPFGVPASILESNDLGEVHPLNENSEALECRRLSSFIVKENEQQPDHTNRGTTEPLQISQVSLISKDTEPVELNCNFSFSRKRKMSCTICGHKFPRKSQLLEHMYTHKGKSYRYNRCQRFGNALAQRFQPYCDSWSDVSLKSSRLSQEHLDLPCALESELTQENVDTILVE

SEQ ID NO: 73 - protein, 349 aa, Homo sapiens
  source 1..349: note = sp|Q8WWH5|TRUB1_HUMAN Probable tRNA pseudouridine synthase 1 OS=Homo sapiens OX=9606 GN=TRUB1 PE=1 SV=1
MAASEAAVVSSPSLKTDTSPVLETAGTVAAMAATPSARAAAAVVAAAARTGSEARVSKAALATKLLSLSGVFAVHKPKGPTSAELLNRLKEKLLAEAGMPSPEWTKRKKQTLKIGHGGTLDSAARGVLVVGIGSGTKMLTSMLSGSKRYTAIGELGKATDTLDSTGRVTEEKPYDKITQEDIEGILQKFTGNIMQVPPLYSALKKDGQRLSTLMKRGEVVEAKPARPVTVYSISLQKFQPPFFTLDVECGGGFYIRSLVSDIGKELSSCANVLELTRTKQGPFTLEEHALPEDKWTIDDIAQSLEHCSSLFPAELALKKSKPESNEQVLSCEYITLNEPKREDDVIKTC

SEQ ID NO: 74 - protein, 279 aa, Homo sapiens
  source 1..279: note = sp|P54709|AT1B3_HUMAN Sodium/potassium-transporting ATPase subunit beta-3 OS=Homo sapiens OX=9606 GN=ATP1B3; PE = 1 SV=1
MTKNEKKSLNQSLAEWKLFIYNPTTGEFLGRTAKSWGLILLFYLVFYGFLAALFSFTMWVMLQTLNDEVPKYRDQIPSPGLMVFPKPVTALEYTFSRSDPTSYAGYIEDLKKFLKPYTLEEQKNLTVCPDGALFEQKGPVYVACQFPISLLQACSGMNDPDFGYSQGNPCILVKMNRIIGLKPEGVPRIDCVSKNEDIPNVAVYPHNGMIDLKYFPYYGKKLHVGYLQPLVAVQVSFAPNNTGKEVTVECKIDGSANLKSQDDRDKFLGRVMFKITARA

SEQ ID NO: 75 - protein, 406 aa, Homo sapiens
  source 1..406: note = sp|Q9UNH7|SNX6_HUMAN Sorting nexin-6 OS=Homo sapiens; OX = 9606 GN=SNX6 PE=1 SV=1
MMEGLDDGPDFLSEEDRGLKAINVDLQSDAALQVDISDALSERDKVKFTVHTKSSLPNFKQNEFSVVRQHEEFIWLHDSFVENEDYAGYIIPPAPPRPDFDASREKLQKLGEGEGSMTKEEFTKMKQELEAEYLAIFKKTVAMHEVFLCRVAAHPILRRDLNFHVFLEYNQDLSVRGKNKKEKLEDFFKNMVKSADGVIVSGVKDVDDFFEHERTFLLEYHNRVKDASAKSDRMTRSHKSAADDYNRIGSSLYALGTQDSTDICKFFLKVSELFDKTRKIEARVSADEDLKLSDLLKYYLRESQAAKDLLYRRSRSLVDYENANKALDKARAKNKDVLQAETSQQLCCQKFEKISESAKQELIDFKTRRVAAFRKNLVELAELELKHAKGNLQLLQNCLAVLNGDT

SEQ ID NO: 76 - protein, 582 aa, Homo sapiens
  source 1..582: note = sp|Q9NPI6|DCP1A_HUMAN mRNA-decapping enzyme 1A; OS = Homo sapiens OX=9606 GN=DCP1A PE=1 SV=3
MEALSRAGQEMSLAALKQHDPYITSIADLTGQVALYTFCPKANQWEKTDIEGTLFVYRRSASPYHGFTIVNRLNMHNLVEPVNKDLEFQLHEPFLLYRNASLSIYSIWFYDKNDCHRIAKLMADVVEEETRRSQQAARDKQSPSQANGCSDHRPIDILEMLSRAKDEYERNQMGDSNISSPGLQPSTQLSNLGSTETLEEMPSGSQDKSAPSGHKHLTVEELFGTSLPKEQPAVVGLDSEEMERLPGDASQKEPNSFLPFPFEQLGGAPQSETLGVPSAAHHSVQPEITTPVLITPASITQSNEKHAPTYTIPLSPVLSPTLPAEAPTAQVPPSLPRNSTMMQAVKTTPRQRSPLLNQPVPELSHASLIANQSPFRAPLNVTNTAGTSLPSVDLLQKLRLTPQHDQIQTQPLGKGAMVASFSPAAGQLATPESFIEPPSKTAAARVAASASLSNMVLAPLQSMQQNQDPEVFVQPKVLSSAIPVAGAPLVTATTTAVSSVLLAPSVFQQTVTRSSDLERKASSPSPLTIGTPESQRKPSIILSKSQLQDTLIHLIKNDSSFLSTLHEVYLQVLTKNKDNHNL

SEQ ID NO: 77 - protein, 416 aa, Homo sapiens
  source 1..416: note = sp|Q86YD1|PTOV1_HUMAN Prostate tumor-overexpressed gene 1 protein OS=Homo sapiens OX=9606 GN=PTOV1 PE=1 SV=1
MVRPRRAPYRSGAGGPLGGRGRPPRPLVVRAVRSRSWPASPRGPQPPRIRARSAPPMEGARVFGALGPIGPSSPGLTLGGLAVSEHRLSNKLLAWSGVLEWQEKRRPYSDSTAKLKRTLPCQAYVNQGENLETDQWPQKLIMQLIPQQLLTTLGPLFRNSQLAQFHFTNRDCDSLKGLCRIMGNGFAGCMLFPHISPCEVRVLMLLYSSKKKIFMGLIPYDQSGFVSAIRQVITTRKQAVGPGGVNSGPVQIVNNKFLAWSGVMEWQEPRPEPNSRSKRWLPSHVYVNQGEILRTEQWPRKLYMQLIPQQLLTTLVPLFRNSRLVQFHFTKDLETLKSLCRIMDNGFAGCVHFSYKASCEIRVLMLLYSSEKKIFIGLIPHDQGNFVNGIRRVIANQQQVLQRNLEQEQQQRGMGG

SEQ ID NO: 78 - protein, 383 aa, Homo sapiens
  source 1..383: note = sp|Q29980|MICB_HUMAN MHC class I polypeptide-related sequence B OS=Homo sapiens OX=9606 GN=MICB PE=1 SV=2
MGLGRVLLFLAVAFPFAPPAAAAEPHSLRYNLMVLSQDGSVQSGFLAEGHLDGQPFLRYDRQKRRAKPQGQWAENVLGAKTWDTETEDLTENGQDLRRTLTHIKDQKGGLHSLQEIRVCEIHEDSSTRGSRHFYYDGELFLSQNLETQESTVPQSSRAQTLAMNVTNFWKEDAMKTKTHYRAMQADCLQKLQRYLKSGVAIRRTVPPMVNVTCSEVSEGNITVTCRASSFYPRNITLTWRQDGVSLSHNTQQWGDVLPDGNGTYQTWVATRIRQGEEQRFTCYMEHSGNHGTHPVPSGKALVLQSQRTDFPYVSAAMPCFVIIIILCVPCCKKKTSAAEGPELVSLQVLDQHPVGTGDHRDAAQLGFQPLMSATGSTGSTEGT

SEQ ID NO: 79 - protein, 345 aa, Homo sapiens
  source 1..345: note = sp|Q86YD5|LRAD3_HUMAN Low-density lipoprotein receptor class A domain-containing protein 3 OS=Homo sapiens OX=9606 GN=LDLRAD3 PE=2 SV=3
MWLLGPLCLLLSSAAESQLLPGNNFTNECNIPGNFMCSNGRCIPGAWQCDGLPDCFDKSDEKECPKAKSKCGPTFFPCASGIHCIIGRFRCNGFEDCPDGSDEENCTANPLLCSTARYHCKNGLCIDKSFICDGQNNCQDNSDEESCESSQEPGSGQVFVTSENQLVYYPSITYAIIGSSVIFVLVVALLALVLHHQRKRNNLMTLPVHRLQHPVLLSRLVVLDHPHHCNVTYNVNNGIQYVASQAEQNASEVGSPPSYSEALLDQRPAWYDLPPPPYSSDTESLNQADLPPYRSRSGSANSASSQAASSLLSVEDTSHSPGQPGPQEGTAEPRDSEPSQGTEEV

SEQ ID NO: 80 - protein, 530 aa, Homo sapiens
  source 1..530: note = sp|Q96CW9|NTNG2_HUMAN Netrin-G2 OS=Homo sapiens; OX = 9606 GN=NTNG2 PE=1 SV=2
MLHLLALFLHCLPLASGDYDICKSWVTTDEGPTWEFYACQPKVMRLKDYVKVKVEPSGITCGDPPERFCSHENPYLCSNECDASNPDLAHPPRLMFDKEEEGLATYWQSITWSRYPSPLEANITLSWNKTVELTDDVVMTFEYGRPTVMVLEKSLDNGRTWQPYQFYAEDCMEAFGMSARRARDMSSSSAHRVLCTEEYSRWAGSKKEKHVRFEVRDRFAIFAGPDLRNMDNLYTRLESAKGLKEFFTLTDLRMRLLRPALGGTYVQRENLYKYFYAISNIEVIGRCKCNLHANLCSMREGSLQCECEHNTTGPDCGKCKKNFRTRSWRAGSYLPLPHGSPNACATAGSFGNCECYGHSNRCSYIDFLNVVTCVSCKHNTRGQHCQHCRLGYYRNGSAELDDENVCIECNCNQIGSVHDRCNETGFCECREGAAGPKCDDCLPTHYWRQGCYPNVCDDDQLLCQNGGTCLQNQRCACPRGYTGVRCEQPRCDPADDDGGLDCDRAPGAAPRPATLLGCLLLLGLAARLGR

SEQ ID NO: 81 - protein, 474 aa, Homo sapiens
  source 1..474: note = sp|Q15928|ZN141_HUMAN Zinc finger protein 141; OS = Homo sapiens OX=9606 GN=ZNF141 PE=1 SV=1
MELLTFRDVAIEFSPEEWKCLDPDQQNLYRDVMLENYRNLVSLGVAISNPDLVTCLEQRKEPYNVKIHKIVARPPAMCSHFTQDHWPVQGIEDSFHKLILRRYEKCGHDNLQLRKGCKSLNECKLQKGGYNEFNECLSTTQSKILQCKASVKVVSKFSNSNKRKTRHTGEKHFKECGKSFQKFSHLTQHKVIHAGEKPYTCEECGKAFKWSLIFNEHKRIHTGEKPFTCEECGSIFTTSSHFAKHKIIHTGEKPYKCEECGKAFNRFTTLTKHKRIHAGEKPITCEECRKIFTSSSNFAKHKRIHTGEKPYKCEECGKAFNRSTTLTKHKRIHTGEKPYTCEECGKAFRQSSKLNEHKKVHTGERPYKCDECGKAFGRSRVLNEHKKIHTGEKPYKCEECGKAFRRSTDRSQHKKIHSADKPYKCKECDKAFKQFSLLSQHKKIHTVDKPYKCKDCDKAFKRFSHLNKHKKIHT

SEQ ID NO: 82 - protein, 297 aa, Homo sapiens
  source 1..297: note = sp|P25325|THTM_HUMAN 3-mercaptopyruvate sulfurtransferase OS=Homo sapiens OX=9606 GN=MPST PE=1 SV=3
MASPQLCRALVSAQWVAEALRAPRAGQPLQLLDASWYLPKLGRDARREFEERHIPGAAFFDIDQCSDRTSPYDHMLPGAEHFAEYAGRLGVGAATHVVIYDASDQGLYSAPRVWWMFRAFGHHAVSLLDGGLRHWLRQNLPLSSGKSQPAPAEFRAQLDPAFIKTYEDIKENLESRRFQVVDSRATGRFRGTEPEPRDGIEPGHIPGTVNIPFTDFLSQEGLEKSPEEIRHLFQEKKVDLSKPLVATCGSGVTACHVALGAYLCGKPDVPIYDGSWVEWYMRARPEDVISEGRGKTH

SEQ ID NO: 83 - protein, 458 aa, Homo sapiens
  source 1..458: note = sp|Q01415|GALK2_HUMAN N-acetylgalactosamine kinase; OS = Homo sapiens OX=9606 GN=GALK2 PE=1 SV=1
MATESPATRRVQVAEHPRLLKLKEMFNSKFGSIPKFYVRAPGRVNIIGEHIDYCGYSVLPMAVEQDVLIAVEPVKTYALQLANTNPLYPDFSTSANNIQIDKTKPLWHNYFLCGLKGIQEHFGLSNLTGMNCLVDGNIPPSSGLSSSSALVCCAGLVTLTVLGRNLSKVELAEICAKSERYIGTEGGGMDQSISFLAEEGTAKLIEFSPLRATDVKLPSGAVFVIANSCVEMNKAATSHFNIRVMECRLAAKLLAKYKSLQWDKVLRLEEVQAKLGISLEEMLLVTEDALHPEPYNPEEICRCLGISLEELRTQILSPNTQDVLIFKLYQRAKHVYSEAARVLQFKKICEEAPENMVQLLGELMNQSHMSCRDMYECSCPELDQLVDICRKFGAQGSRLTGAGWGGCTVSMVPADKLPSFLANVHKAYYQRSDGSLAPEKQSLFATKPGGGALVLLEA

SEQ ID NO: 84 - protein, 1188 aa, Homo sapiens
  source 1..1188: note = sp|Q9UKX5|ITA11_HUMAN Integrin alpha-11 OS=Homo sapiens OX=9606 GN=ITGA11 PE=1 SV=2
MDLPRGLVVAWALSLWPGFTDTFNMDTRKPRVIPGSRTAFFGYTVQQHDISGNKWLVVGAPLETNGYQKTGDVYKCPVIHGNCTKLNLGRVTLSNVSERKDNMRLGLSLATNPKDNSFLACSPLWSHECGSSYYTTGMCSRVNSNFRFSKTVAPALQRCQTYMDIVIVLDGSNSIYPWVEVQHFLINILKKFYIGPGQIQVGVVQYGEDVVHEFHLNDYRSVKDVVEAASHIEQRGGTETRTAFGIEFARSEAFQKGGRKGAKKVMIVITDGESHDSPDLEKVIQQSERDNVTRYAVAVLGYYNRRGINPETFLNEIKYIASDPDDKHFFNVTDEAALKDIVDALGDRIFSLEGTNKNETSFGLEMSQTGFSSHVVEDGVLLGAVGAYDWNGAVLKETSAGKVIPLRESYLKEFPEELKNHGAYLGYTVTSVVSSRQGRVYVAGAPRFNHTGKVILFTMHNNRSLTIHQAMRGQQIGSYFGSEITSVDIDGDGVTDVLLVGAPMYFNEGRERGKVYVYELRQNLFVYNGTLKDSHSYQNARFGSSIASVRDLNQDSYNDVVVGAPLEDNHAGAIYIFHGFRGSILKTPKQRITASELATGLQYFGCSIHGQLDLNEDGLIDLAVGALGNAVILWSRPVVQINASLHFEPSKINIFHRDCKRSGRDATCLAAFLCFTPIFLAPHFQTTTVGIRYNATMDERRYTPRAHLDEGGDRFTNRAVLLSSGQELCERINFHVLDTADYVKPVTFSVEYSLEDPDHGPMLDDGWPTTLRVSVPFWNGCNEDEHCVPDLVLDARSDLPTAMEYCQRVLRKPAQDCSAYTLSFDTTVFIIESTRQRVAVEATLENRGENAYSTVLNISQSANLQFASLIQKEDSDGSIECVNEERRLQKQVCNVSYPFFRAKAKVAFRLDFEFSKSIFLHHLEIELAAGSDSNERDSTKEDNVAPLRFHLKYEADVLFTRSSSLSHYEVKPNSSLERYDGIGPPFSCIFRIQNLGLFPIHGMMMKITIPIATRSGNRLLKLRDFLTDEANTSCNIWGNSTEYRPTPVEEDLRRAPQLNHSNSDVVSINCNIRLVPNQEINFHLLGNLWLRSLKALKYKSMKIMVNAALQRQFHSPFIFREEDPSRQIVFEISKQEDWQVPIWIIVGSTLGGLLLLALLVLALWKLGFFRSARRRREPGLDPTPKVLE

SEQ ID NO: 85 - protein, 403 aa, Homo sapiens [sequence omitted]

SEQ ID NO: 86 - protein, 815 aa, Homo sapiens
  source 1..815: note = sp|P54253|ATX1_HUMAN Ataxin-1 OS=Homo sapiens; OX = 9606 GN=ATXN1 PE=1 SV=2
MKSNQERSNECLPPKKREIPATSRSSEEKAPTLPSDNHRVEGTAWLPGNPGGRGHGGGRHGPAGTSVELGLQQGIGLHKALSTGLDYSPPSAPRSVPVATTLPAAYATPQPGTPVSPVQYAHLPHTFQFIGSSQYSGTYASFIPSQLIPPTANPVTSAVASAAGATTPSQRSQLEAYSTLLANMGSLSQTPGHKAEQQQQQQQQQQQQHQHQQQQQQQQQQQQQQHLSRAPGLITPGSPPPAQQNQYVHISSSPQNTGRTASPPAIPVHLHPHQTMIPHTLTLGPPSQVVMQYADSGSHFVPREATKKAESSRLQQAIQAKEVLNGEMEKSRRYGAPSSADLGLGKAGGKSVPHPYESRHVVVHPSPSDYSSRDPSGVRASVMVLPNSNTPAADLEVQQATHREASPSTLNDKSGLHLGKPGHRSYALSPHTVIQTTHSASEPLPVGLPATAFYAGTQPPVIGYLSGQQQAITYAGSLPQHLVIPGTQPLLIPVGSTDMEASGAAPAIVTSSPQFAAVPHTFVTTALPKSENFNPEALVTQAAYPAMVQAQIHLPVVQSVASPAAAPPTLPPYFMKGSIIQLANGELKKVEDLKTEDFIQSAEISNDLKIDSSTVERIEDSHSPGVAVIQFAVGEHRAQVSVEVLVEYPFFVFGQGWSSCCPERTSQLFDLPCSKLSVGDVCISLTLKNLKNGSVKKGQPVDPASVLLKHSKADGLAGSRHRYAEQENGINQGSAQMLSENGELKFPEKMGLPAAPFLTKIEPSKPAATRKRRWSAPESRKLEKSEDEPPLTLPKPSLIPQEVKICIEGRSNVGK

SEQ ID NO: 87 - protein, 525 aa, Homo sapiens
  source 1..525: note = sp|Q5SXM1|ZN678_HUMAN Zinc finger protein 678; OS = Homo sapiens OX=9606 GN=ZNF678 PE=2 SV=1
MGTISLCIGVCAFEGANTSTSFYKLVYTAILSYSIQDLLPEQDMKDLCQKVTLTRHRSWGLDNLHLVKDWRTVNEGKGQKEYCNRLTQCSSTKSKIFQCIECGRNFSWRSILTEHKRIHTGEKPYKCEECGKVFNRCSNLTKHKRIHTGEKPYKCDECGKVFNWWSQLTNHKKIHTGEKPYKCDECDKVFNWWSQLTSHKKIHSGEKPYPCEECGKAFTQFSNLTQHKRIHTGEKPYKCKECCKAFNKFSNLTQHKRIHTGEKPYKCEECGNVFNECSHLTRHRRIHTGEKPYKCEECGKAFTQFASLTRHKRIHTGEKPYQCEECGKTFNRCSHLSSHKRIHTGEKPYKCEECGRTFTQFSNLTQHKRIHTGEKPYKCKECGKAFNKFSSLTQHRRIHTGVKPYKCEECGKVFKQCSHLTSHKRIHTGEKPYKCKECGKAFYQSSILSKHKRIHTEEKPYKCEECGKAFNQFSSLTRHKRIHTGEKRYKCKECGKGFYQSSIHSKYKRIYTGEEPDKCKKCGSL

SEQ ID NO: 88 - protein, 75 aa, Homo sapiens
  source 1..75: note = sp|P50150|GBG4_HUMAN Guanine nucleotide-binding protein G(I)/G(S)/G(O) subunit gamma-4 OS=Homo sapiens; OX = 9606 GN=GNG4 PE=1 SV=1
MKEGMSNNSTTSISQARKAVEQLKMEACMDRVKVSQAAADLLAYCEAHVREDPLIIPVPASENPFREKKFFCTIL

SEQ ID NO: 89 - protein, 648 aa, Homo sapiens
  source 1..648: note = sp|Q96QE2|MYCT_HUMAN Proton myo-inositol cotransporter OS=Homo sapiens OX=9606 GN=SLC2A13 PE=1 SV=3
MSRKASENVEYTLRSLSSLMGERRRKQPEPDAASAAGECSLLAAAESSTSLQSAGAGGGGVGDLERAARRQFQQDETPAFVYVVAVFSALGGFLFGYDTGVVSGAMLLLKRQLSLDALWQELLVSSTVGAAAVSALAGGALNGVFGRRAAILLASALFTAGSAVLAAANNKETLLAGRLVVGLGIGIASMTVPVYIAEVSPPNLRGRLVTINTLFITGGQFFASVVDGAFSYLQKDGWRYMLGLAAVPAVIQFFGFLFLPESPRWLIQKGQTQKARRILSQMRGNQTIDEEYDSIKNNIEEEEKEVGSAGPVICRMLSYPPTRRALIVGCGLQMFQQLSGINTIMYYSATILQMSGVEDDRLAIWLASVTAFTNFIFTLVGVWLVEKVGRRKLTFGSLAGTTVALIILALGFVLSAQVSPRITFKPIAPSGQNATCTRYSYCNECMLDPDCGFCYKMNKSTVIDSSCVPVNKASTNEAAWGRCENETKFKTEDIFWAYNFCPTPYSWTALLGLILYLVFFAPGMGPMPWTVNSEIYPLWARSTGNACSSGINWIFNVLVSLTFLHTAEYLTYYGAFFLYAGFAAVGLLFIYGCLPETKGKKLEEIESLFDNRLCTCGTSDSDEGRYIEYIRVKGSNYHLSDNDASDVE

SEQ ID NO: 90 - protein, 1585 aa, Homo sapiens
  source 1..1585: note = sp|O43432|IF4G3_HUMAN Eukaryotic translation initiation factor 4 gamma 3 OS=Homo sapiens OX=9606; GN = EIF4G3 PE=1 SV=2
MNSQPQTRSPFFQRPQIQPPRATIPNSSPSIRPGAQTPTAVYQANQHIMMVNHLPMPYPVPQGPQYCIPQYRHSGPPYVGPPQQYPVQPPGPGPFYPGPGPGDFPNAYGTPFYPSQPVYQSAPIIVPTQQQPPPAKREKKTIRIRDPNQGGKDITEEIMSGGGSRNPTPPIGRPTSTPTPPQQLPSQVPEHSPVVYGTVESAHLAASTPVTAASDQKQEEKPKPDPVLKSPSPVLRLVLSGEKKEQEGQTSETTAIVSIAELPLPPSPTTVSSVARSTIAAPTSSALSSQPIFTTAIDDRCELSSPREDTIPIPSLTSCTETSDPLPTNENDDDICKKPCSVAPNDIPLVSSTNLINEINGVSEKLSATESIVEIVKQEVLPLTLELEILENPPEEMKLECIPAPITPSTVPSFPPTPPTPPASPPHTPVIVPAAATTVSSPSAAITVQRVLEEDESIRTCLSEDAKEIQNKIEVEADGQTEEILDSQNLNSRRSPVPAQIAITVPKTWKKPKDRTRTTEEMLEAELELKAEEELSIDKVLESEQDKMSQGFHPERDPSDLKKVKAVEENGEEAEPVRNGAESVSEGEGIDANSGSTDSSGDGVTFPFKPESWKPTDTEGKKQYDREFLLDFQFMPACIQKPEGLPPISDVVLDKINQPKLPMRTLDPRILPRGPDFTPAFADFGRQTPGGRGVPLLNVGSRRSQPGQRREPRKIITVSVKEDVHLKKAENAWKPSQKRDSQADDPENIKTQELFRKVRSILNKLTPQMFNQLMKQVSGLTVDTEERLKGVIDLVFEKAIDEPSFSVAYANMCRCLVTLKVPMADKPGNTVNFRKLLLNRCQKEFEKDKADDDVFEKKQKELEAASAPEERTRLHDELEEAKDKARRRSIGNIKFIGELFKLKMLTEAIMHDCVVKLLKNHDEESLECLCRLLTTIGKDLDFEKAKPRMDQYFNQMEKIVKERKTSSRIRFMLQDVIDLRLCNWVSRRADQGPKTIEQIHKEAKIEEQEEQRKVQQLMTKEKRRPGVQRVDEGGWNTVQGAKNSRVLDPSKFLKITKPTIDEKIQLVPKAQLGSWGKGSSGGAKASETDALRSSASSLNRFSALQPPAPSGSTPSTPVEFDSRRTLTSRGSMGREKNDKPLPSATARPNTFMRGGSSKDLLDNQSQEEQRREMLETVKQLTGGVDVERNSTEAERNKTRESAKPEISAMSAHDKAALSEEELERKSKSIIDEFLHINDFKEAMQCVEELNAQGLLHVFVRVGVESTLERSQITRDHMGQLLYQLVQSEKLSKQDFFKGFSETLELADDMAIDIPHIWLYLAELVTPMLKEGGISMRELTIEFSKPLLPVGRAGVLLSEILHLLCKQMSHKKVGALWREADLSWKDFLPEGEDVHNFLLEQKLDFIESDSPCSSEALSKKELSAEELYKRLEKLIIEDKANDEQIFDWVEANLDEIQMSSPTFLRALMTAVCKAAIIADSSTFRVDTAVIKQRVPILLKYLDSDTEKELQALYALQASIVKLDQPANLLRMFFDCLYDEEVISEDAFYKWESSKDPAEQNGKGVALKSVTAFFTWLREAEEESEDN

SEQ ID NO: 91 - protein, 976 aa, Homo sapiens
  source 1..976: note = sp|Q86W56|PARG_HUMAN Poly(ADP-ribose) glycohydrolase; OS = Homo sapiens OX=9606 GN=PARG PE=1 SV=1
MNAGPGCEPCTKRPRWGAATTSPAASDARSFPSRQRRVLDPKDAHVQFRVPPSSPACVPGRAGQHRGSATSLVFKQKTITSWMDTKGIKTAESESLDSKENNNTRIESMMSSVQKDNFYQHNVEKLENVSQLSLDKSPTEKSTQYLNQHQTAAMCKWQNEGKHTEQLLESEPQTVTLVPEQFSNANIDRSPQNDDHSDTDSEENRDNQQFLTTVKLANAKQTTEDEQAREAKSHQKCSKSCDPGEDCASCQQDEIDVVPESPLSDVGSEDVGTGPKNDNKLTRQESCLGNSPPFEKESEPESPMDVDNSKNSCQDSEADEETSPGFDEQEDGSSSQTANKPSRFQARDADIEFRKRYSTKGGEVRLHFQFEGGESRTGMNDLNAKLPGNISSLNVECRNSKQHGKKDSKITDHFMRLPKAEDRRKEQWETKHQRTERKIPKYVPPHLSPDKKWLGTPIEEMRRMPRCGIRLPLLRPSANHTVTIRVDLLRAGEVPKPFPTHYKDLWDNKHVKMPCSEQNLYPVEDENGERTAGSRWELIQTALLNKFTRPQNLKDAILKYNVAYSKKWDFTALIDFWDKVLEEAEAQHLYQSILPDMVKIALCLPNICTQPIPLLKQKMNHSITMSQEQIASLLANAFFCTFPRRNAKMKSEYSSYPDINFNRLFEGRSSRKPEKLKTLFCYFRRVTEKKPTGLVTFTRQSLEDFPEWERCEKPLTRLHVTYEGTIEENGQGMLQVDFANRFVGGGVTSAGLVQEEIRFLINPELIISRLFTEVLDHNECLIITGTEQYSEYTGYAETYRWSRSHEDGSERDDWQRRCTEIVAIDALHFRRYLDQFVPEKMRRELNKAYCGFLRPGVSSENLSAVATGNWGCGAFGGDARLKALIQILAAAAAERDVVYFTFGDSELMRDIYSMHIFLTERKLTVGDVYKLLLRYYNEECRNCSTPGPDIKLYPFIYHAVESCAETADHSGQRTGT

SEQ ID NO: 92 - protein, 204 aa, Homo sapiens
  source 1..204: note = sp|Q9UD71|PPR1B_HUMAN Protein phosphatase 1 regulatory subunit 1B OS=Homo sapiens OX=9606 GN=PPP1R1B; PE = 1 SV=2
MDPKDRKKIQFSVPAPPSQLDPRQVEMIRRRRPTPAMLFRLSEHSSPEEEASPHQRASGEGHHLKSKRPNPCAYTPPSLKAVQRIAESHLQSISNLNENQASEEEDELGELRELGYPREEDEEEEEDDEEEEEEEDSQAEVLKVIRQSAGQKTTCGQGLEGPWERPPPLDESERDGGSEDQVEDPALSEPGEEPQRPSPSEPGT

SEQ ID NO: 93 - protein, 1042 aa, Homo sapiens
  source 1..1042: note = sp|Q96FS4|SIPA1_HUMAN Signal-induced proliferation-associated protein 1 OS=Homo sapiens OX=9606; GN = SIPA1 PE=1 SV=1
MPMWAGGVGSPRRGMAPASTDDLFARKLRQPARPPLTPHTFEPRPVRGPLLRSGSDAGEARPPTPASPRARAHSHEEASRPAATSTRLFTDPLALLGLPAEEPEPAFPPVLEPRWFAHYDVQSLLFDWAPRSQGMGSHSEASSGTLASAEDQAASSDLLHGAPGFVCELGGEGELGLGGPASPPVPPALPNAAVSILEEPQNRTSAYSLEHADLGAGYYRKYFYGKEHQNFFGMDESLGPVAVSLRREEKEGSGGGTLHSYRVIVRTTQLRTLRGTISEDALPPGPPRGLSPRKLLEHVAPQLSPSCLRLGSASPKVPRTLLTLDEQVLSFQRKVGILYCRAGQGSEEEMYNNQEAGPAFMQFLTLLGDVVRLKGFESYRAQLDTKTDSTGTHSLYTTYQDHEIMFHVSTMLPYTPNNQQQLLRKRHIGNDIVTIVFQEPGSKPFCPTTIRSHFQHVFLVVRAHTPCTPHTTYRVAVSRTQDTPAFGPALPAGGGPFAANADFRAFLLAKALNGEQAAGHARQFHAMATRTRQQYLQDLATNEVTTTSLDSASRFGLPSLGGRRRAAPRGPGAELQAAGSLVWGVRAAPGARVAAGAQASGPEGIEVPCLLGISAEALVLVAPRDGRVVFNCACRDVLAWTFSEQQLDLYHGRGEAITLRFDGSPGQAVGEVVARLQLVSRGCETRELALPRDGQGRLGFEVDAEGFVTHVERFTFAETAGLRPGARLLRVCGQTLPSLRPEAAAQLLRSAPKVCVTVLPPDESGRPRRSFSELYTLSLQEPSRRGAPDPVQDEVQGVTLLPTTKQLLHLCLQDGGSPPGPGDLAEERTEFLHSQNSLSPRSSLSDEAPVLPNTTPDLLLATTAKPSVPSADSETPLTQDRPGSPSGSEDKGNPAPELRASFLPRTLSLRNSISRIMSEAGSGTLEDEWQAISEIASTCNTILESLSREGQPIPESGDPKGTPKSDAEPEPGNLSEKVSHLESMLRKLQEDLQKEKADRAALEEEVRSLRHNNRRLQAESESAATRLLLASKQLGSPTADLA

SEQ ID NO: 94 - protein, 206 aa, Homo sapiens
  source 1..206: note = sp|Q13007|IL24_HUMAN Interleukin-24 OS=Homo sapiens; OX = 9606 GN=IL24 PE=1 SV=1
MNFQQRLQSLWTLARPFCPPLLATASQMQMVVLPCLGFTLLLWSQVSGAQGQEFHFGPCQVKGVVPQKLWEAFWAVKDTMQAQDNITSARLLQQEVLQNVSDAESCYLVHTLLEFYLKTVFKNYHNRTVEVRTLKSFSTLANNFVLIVSQLQPSQENEMFSIRDSAHRRFLLFRRAFKQLDVEAALTKALGEVDILLTWMQKFYKL

SEQ ID NO: 95 - protein, 417 aa, Homo sapiens [sequence omitted]

SEQ ID NO: 96 - protein, 158 aa, Homo sapiens
  source 1..158: note = sp|P25791|RBTN2_HUMAN Rhombotin-2 OS=Homo sapiens; OX = 9606 GN=LMO2 PE=1 SV=1
MSSAIERKSLDPSEEPVDEVLQIPPSLLTCGGCQQNIGDRYFLKAIDQYWHEDCLSCDLCGCRLGEVGRRLYYKLGRKLCRRDYLRLFGQDGLCASCDKRIRAYEMTMRVKDKVYHLECFKCAACQKHFCVGDRYLLINSDIVCEQDIYEWTKINGMI

SEQ ID NO: 97 - protein, 189 aa, Homo sapiens
  source 1..189: note = sp|Q9BZM1|PG12A_HUMAN Group XIIA secretory phospholipase A2 OS=Homo sapiens OX=9606 GN=PLA2G12A PE=1; SV = 1
MALLSRPALTLLLLLMAAVVRCQEQAQTTDWRATLKTIRNGVHKIDTYLNAALDLLGGEDGLCQYKCSDGSKPFPRYGYKPSPPNGCGSPLFGVHLNIGIPSLTKCCNQHDRCYETCGKSKNDCDEEFQYCLSKICRDVQKTLGLTQHVQACETTVELLFDSVIHLGCKPYLDSQRAACRCHYEEKTDL

SEQ ID NO: 98 - protein, 711 aa, Homo sapiens
  source 1..711: note = sp|Q9H116|GZF1_HUMAN GDNF-inducible zinc finger protein 1 OS=Homo sapiens OX=9606 GN=GZF1 PE=1 SV=1
MESGAVLLESKSSPFNLLHEMHELRLLGHLCDVTVSVEYQGVRKDFMAHKAVLAATSKFFKEVFLNEKSVDGTRTNVYLNEVQVADFASFLEFVYTAKVQVEEDRVQRMLEVAEKLKCLDLSETCFQLKKQMLESVLLELQNFSESQEVEVSSGSQVSAAPAPRASVATDGPHPSGLTDSLDYPGERASNGMSSDLPPKKSKDKLDKKKEVVKPPYPKIRRASGRLAGRKVFVEIPKKKYTRRLREQQKTAEGDVGDYRCPQDQSPDRVGTEMEQVSKNEGCQAGAELEELSKKAGPEEEEEEEEEDEEGEKKKSNFKCSICEKAFLYEKSFLKHSKHRHGVATEVVYRCDTCGQTFANRCNLKSHQRHVHSSERHFPCELCGKKFKRKKDVKRHVLQVHEGGGERHRCGQCGKGLSSKTALRLHERTHTGDRPYGCTECGARFSQPSALKTHMRIHTGEKPFVCDECGARFTQNHMLIYHKRCHTGERPFMCETCGKSFASKEYLKHHNRIHTGSKPFKCEVCFRTFAQRNSLYQHIKVHTGERPYCCDQCGKQFTQLNALQRHRRIHTGERPFMCNACGRTFTDKSTLRRHTSIHDKNTPWKSFLVIVDGSPKNDDGHKTEQPDEEYVSSKLSDKLLSFAENGHFHNLAAVQDTVPTMQENSSADTACKADDSVVSQDTLLATTISELSELTPQTDSMPTQLHSLSNME

SEQ ID NO: 99 - protein, 507 aa, Homo sapiens
  source 1..507: note = sp|Q9Y6M5|ZNT1_HUMAN Zinc transporter 1 OS=Homo sapiens OX=9606 GN=SLC30A1 PE=1 SV=3
MGCWGRNRGRLLCMLALTFMFMVLEVVVSRVTSSLAMLSDSFHMLSDVLALVVALVAERFARRTHATQKNTFGWIRAEVMGALVNAIFLTGLCFAILLEAIERFIEPHEMQQPLVVLGVGVAGLLVNVLGLCLFHHHSGFSQDSGHGHSHGGHGHGHGLPKGPRVKSTRPGSSDINVAPGEQGPDQEETNTLVANTSNSNGLKLDPADPENPRSGDTVEVQVNGNLVREPDHMELEEDRAGQLNMRGVFLHVLGDALGSVIVVVNALVFYFSWKGCSEGDFCVNPCFPDPCKAFVEIINSTHASVYEAGPCWVLYLDPTLCVVMVCILLYTTYPLLKESALILLQTVPKQIDIRNLIKELRNVEGVEEVHELHVWQLAGSRIIATAHIKCEDPTSYMEVAKTIKDVFHNHGIHATTIQPEFASVGSKSSVVPCELACRTQCALKQCCGTLPQAPSGKDAEKTPAVSISCLELSNNLEKKPRRTKAENIPAVVIEIKNMPNKQPESSL

SEQ ID NO: 100 - protein, 588 aa, Homo sapiens
  source 1..588: note = sp|Q16538|GP162_HUMAN Probable G-protein coupled receptor 162 OS=Homo sapiens OX=9606 GN=GPR162 PE=1 SV=1
MARGGAGAEEASLRSNALSWLACGLLALLANAWIILSISAKQQKHKPLELLLCFLAGTHILMAAVPLTTFAVVQLRRQASSDYDWNESICKVFVSTYYTLALATCFTVASLSYHRMWMVRWPVNYRLSNAKKQALHAVMGIWMVSFILSTLPSIGWHNNGERYYARGCQFIVSKIGLGFGVCFSLLLLGGIVMGLVCVAITFYQTLWARPRRARQARRVGGGGGTKAGGPGALGTRPAFEVPAIVVEDARGKRRSSLDGSESAKTSLQVTNLVSAIVFLYDSLTGVPILVVSFFSLKSDSAPPWMVLAVLWCSMAQTLLLPSFIWSCERYRADVRTVWEQCVAIMSEEDGDDDGGCDDYAEGRVCKVRFDANGATGPGSRDPAQVKLLPGRHMLFPPLERVHYLQVPLSRRLSHDETNIFSTPREPGSFLHKWSSSDDIRVLPAQSRALGGPPEYLGQRHRLEDEEDEEEAEGGGLASLRQFLESGVLGSGGGPPRGPGFFREEITTFIDETPLPSPTASPGHSPRRPRPLGLSPRRLSLGSPESRAVGLPLGLSAGRRCSLTGGEESARAWGGSWGPGNPIFPQLTL

SEQ ID NO: 101 - protein, 441 aa, Homo sapiens
  source 1..441: note = sp|Q9BX95|SGPP1_HUMAN Sphingosine-1-phosphate phosphatase 1 OS=Homo sapiens OX=9606 GN=SGPP1 PE=1 SV=2
MSLRQRLAQLVGRLQDPQKVARFQRLCGVEAPPRRSADRREDEKAEAPLAGDPRLRGRQPGAPGGPQPPGSDRNQCPAKPDGGGAPNGVRNGLAAELGPASPRRAGALRRNSLTGEEGQLARVSNWPLYCLFCFGTELGNELFYILFFPFWIWNLDPLVGRRLVVIWVLVMYLGQCTKDIIRWPRPASPPVVKLEVFYNSEYSMPSTHAMSGTAIPISMVLLTYGRWQYPLIYGLILIPCWCSLVCLSRIYMGMHSILDIIAGFLYTILILAVFYPFVDLIDNFNQTHKYAPFIIIGLHLALGIFSFTLDTWSTSRGDTAEILGSGAGIACGSHVTYNMGLVLDPSLDTLPLAGPPITVTLFGKAILRILIGMVFVLIIRDVMKKITIPLACKIFNIPCDDIRKARQHMEVELPYRYITYGMVGFSITFFVPYIFFFIGIS

SEQ ID NO: 102 - protein, 2813 aa, Homo sapiens
  source 1..2813: note = sp|P04275|VWF_HUMAN von Willebrand factor OS=Homo sapiens OX=9606 GN=VWF PE=1 SV=4
MIPARFAGVLLALALILPGTLCAEGTRGRSSTARCSLFGSDFVNTFDGSMYSFAGYCSYLLAGGCQKRSFSIIGDFQNGKRVSLSVYLGEFFDIHLFVNGTVTQGDQRVSMPYASKGLYLETEAGYYKLSGEAYGFVARIDGSGNFQVLLSDRYFNKTCGLCGNFNIFAEDDFMTQEGTLTSDPYDFANSWALSSGEQWCERASPPSSSCNISSGEMQKGLWEQCQLLKSTSVFARCHPLVDPEPFVALCEKTLCECAGGLECACPALLEYARTCAQEGMVLYGWTDHSACSPVCPAGMEYRQCVSPCARTCQSLHINEMCQERCVDGCSCPEGQLLDEGLCVESTECPCVHSGKRYPPGTSLSRDCNTCICRNSQWICSNEECPGECLVTGQSHFKSFDNRYFTFSGICQYLLARDCQDHSFSIVIETVQCADDRDAVCTRSVTVRLPGLHNSLVKLKHGAGVAMDGQDVQLPLLKGDLRIQHTVTASVRLSYGEDLQMDWDGRGRLLVKLSPVYAGKTCGLCGNYNGNQGDDFLTPSGLAEPRVEDFGNAWKLHGDCQDLQKQHSDPCALNPRMTRFSEEACAVLTSPTFEACHRAVSPLPYLRNCRYDVCSCSDGRECLCGALASYAAACAGRGVRVAWREPGRCELNCPKGQVYLQCGTPCNLTCRSLSYPDEECNEACLEGCFCPPGLYMDERGDCVPKAQCPCYYDGEIFQPEDIFSDHHTMCYCEDGFMHCTMSGVPGSLLPDAVLSSPLSHRSKRSLSCRPPMVKLVCPADNLRAEGLECTKTCQNYDLECMSMGCVSGCLCPPGMVRHENRCVALERCPCFHQGKEYAPGETVKIGCNTCVCQDRKWNCTDHVCDATCSTIGMAHYLTFDGLKYLFPGECQYVLVQDYCGSNPGTFRILVGNKGCSHPSVKCKKRVTILVEGGEIELFDGEVNVKRPMKDETHFEVVESGRYIILLLGKALSVVWDRHLSISVVLKQTYQEKVCGLCGNFDGIQNNDLTSSNLQVEEDPVDFGNSWKVSSQCADTRKVPLDSSPATCHNNIMKQTMVDSSCRILTSDVFQDCNKLVDPEPYLDVCIYDTCSCESIGDCACFCDTIAAYAHVCAQHGKVVTWRTATLCPQSCEERNLRENGYECEWRYNSCAPACQVTCQHPEPLACPVQCVEGCHAHCPPGKILDELLQTCVDPEDCPVCEVAGRRFASGKKVTLNPSDPEHCQICHCDVVNLTCEACQEPGGLVVPPTDAPVSPTTLYVEDISEPPLHDFYCSRLLDLVFLLDGSSRLSEAEFEVLKAFVVDMMERLRISQKWVRVAVVEYHDGSHAYIGLKDRKRPSELRRIASQVKYAGSQVASTSEVLKYTLFQIFSKIDRPEASRITLLLMASQEPQRMSRNFVRYVQGLKKKKVIVIPVGIGPHANLKQIRLIEKQAPENKAFVLSSVDELEQQRDEIVSYLCDLAPEAPPPTLPPDMAQVTVGPGLLGVSTLGPKRNSMVLDVAFVLEGSDKIGEADFNRSKEFMEEVIQRMDVGQDSIHVTVLQYSYMVTVEYPFSEAQSKGDILQRVREIRYQGGNRTNTGLALRYLSDHSFLVSQGDREQAPNLVYMVTGNPASDEIKRLPGDIQVVPIGVGPNANVQELERIGWPNAPILIQDFETLPREAPDLVLQRCCSGEGLQIPTLSPAPDCSQPLDVILLLDGSSSFPASYFDEMKSFAKAFISKANIGPRLTQVSVLQYGSITTIDVPWNVVPEKAHLLSLVDVMQREGGPSQIGDALGFAVRYLTSEMHGARPGASKAVVILVTDVSVDSVDAAADAARSNRVTVFPIGIGDRYDAAQLRILAGPAGDSNVVKLQRIEDLPTMVTLGNSFLHKLCSGFVRICMDEDGNEKRPGDVWTLPDQCHTVTCQPDGQTLLKSHRVNCDRGLRPSCPNSQSPVKVEETCGCRWTCPCVCTGSSTRHIVTFDGQNFKLTGSCSYVLFQNKEQDLEVILHNGACSPGARQGCMKSIEVKHSALSVELHSDMEVTVNGRLVSVPYVGGNMEVNVYGAIMHEVRFNHLGHIFTFTPQNNEFQLQLSPKTFASKTYGLCGICDENGANDFMLRDGTVTTDWKTLVQEWTVQRPGQTCQPILEEQCLVPDSSHCQVLLLPLFAECHKVLAPATFYAICQQDSCHQEQVCEVIASYAHLCRTNGVCVDWRTPDFCAMSCPPSLVYNHCEHGCPRHCDGNVSSCGDHPSEGCFCPPDKVMLEGSCVPEEACTQCIGEDGVQHQFLEAWVPDHQPCQICTCLSGRKVNCTTQPCPTAKAPTCGLCEVARLRQNADQCCPEYECVCDPVSCDLPPVPHCERGLQPTLTNPGECRPNFTCACRKEECKRVSPPSCPPHRLPTLRKTQCCDEYECACNCVNSTVSCPLGYLASTATNDCGCTTTTCLPDKVCVHRSTIYPVGQFWEEGCDVCTCTDMEDAVMGLRVAQCSQKPCEDSCRSGFTYVLHEGECCGRCLPSACEVVTGSPRGDSQSSWKSVGSQWASPENPCLINECVRVKEEVFIQQRNVSCPQLEVPVCPSGFQLSCKTSACCPSCRCERMEACMLNGTVIGPGKTVMIDVCTTCRCMVQVGVISGFKLECRKTTCNPCPLGYKEENNTGECCGRCLPTACTIQLRGGQIMTLKRDETLQDGCDTHFCKVNERGEYFWEKRVTGCPPFDEHKCLAEGGKIMKIPGTCCDTCEEPECNDITARLQYVKVGSCKSEVEVDIHYCQGKCASKAMYSIDINDVQDQCSCCSPTRTEPMQVALHCTNGSVVYHEVLNAMECKCSPRKCSK

SEQ ID NO: 103 - protein, 747 aa, Homo sapiens
  source 1..747: note = sp|Q92800|EZH1_HUMAN Histone-lysine N-methyltransferase EZH1 OS=Homo sapiens OX=9606 GN=EZH1; PE = 1 SV=2
MEIPNPPTSKCITYWKRKVKSEYMRLRQLKRLQANMGAKALYVANFAKVQEKTQILNEEWKKLRVQPVQSMKPVSGHPFLKKCTIESIFPGFASQHMLMRSLNTVALVPIMYSWSPLQQNFMVEDETVLCNIPYMGDEVKEEDETFIEELINNYDGKVHGEEEMIPGSVLISDAVFLELVDALNQYSDEEEEGHNDTSDGKQDDSKEDLPVTRKRKRHAIEGNKKSSKKQFPNDMIFSAIASMFPENGVPDDMKERYRELTEMSDPNALPPQCTPNIDGPNAKSVQREQSLHSFHTLFCRRCFKYDCFLHPFHATPNVYKRKNKEIKIEPEPCGTDCFLLLEGAKEYAMLHNPRSKCSGRRRRRHHIVSASCSNASASAVAETKEGDSDRDTGNDWASSSSEANSRCQTPTKQKASPAPPQLCVVEAPSEPVEWTGAEESLFRVFHGTYFNNFCSIARLLGTKTCKQVFQFAVKESLILKLPTDELMNPSQKKKRKHRLWAAHCRKIQLKKDNSSTQVYNYQPCDHPDRPCDSTCPCIMTQNFCEKFCQCNPDCQNRFPGCRCKTQCNTKQCPCYLAVRECDPDLCLTCGASEHWDCKVVSCKNCSIQRGLKKHLLLAPSDVAGWGTFIKESVQKNEFISEYCGELISQDEADRRGKVYDKYMSSFLFNLNNDFVVDATRKGNKIRFANHSVNPNCYAKVVMVNGDHRIGIFAKRAIQAGEELFFDYRYSQADALKYVGIERETDVL

SEQ ID NO: 104 - protein, 274 aa, Homo sapiens
  source 1..274: note = sp|P47985|UCRI_HUMAN Cytochrome b-c1 complex subunit Rieske, mitochondrial OS=Homo sapiens OX=9606 GN=UQCRFS1; PE = 1 SV=2
MLSVASRSGPFAPVLSATSRGVAGALRPLVQATVPATPEQPVLDLKRPFLSRESLSGQAVRRPLVASVGLNVPASVCYSHTDIKVPDFSEYRRLEVLDSTKSSRESSEARKGFSYLVTGVTTVGVAYAAKNAVTQFVSSMSASADVLALAKIEIKLSDIPEGKNMAFKWRGKPLFVRHRTQKEIEQEAAVELSQLRDPQHDLDRVKKPEWVILIGVCTHLGCVPIANAGDFGGYYCPCHGSHYDASGRIRLGPAPLNLEVPTYEFTSDDMVIVG

SEQ ID NO: 105 - protein, 3623 aa, Homo sapiens
  source 1..3623: note = sp|O60494|CUBN_HUMAN Cubilin OS=Homo sapiens OX=9606; GN = CUBN PE=1 SV=5
MMNMSLPFLWSLLTLLIFAEVNGEAGELELQRQKRSINLQQPRMATERGNLVFLTGSAQNIEFRTGSLGKIKLNDEDLSECLHQIQKNKEDIIELKGSAIGLPQNISSQIYQLNSKLVDLERKFQGLQQTVDKKVCSSNPCQNGGTCLNLHDSFFCICPPQWKGPLCSADVNECEIYSGTPLSCQNGGTCVNTMGSYSCHCPPETYGPQCASKYDDCEGGSVARCVHGICEDLMREQAGEPKYSCVCDAGWMFSPNSPACTLDRDECSFQPGPCSTLVQCFNTQGSFYCGACPTGWQGNGYICEDINECEINNGGCSVAPPVECVNTPGSSHCQACPPGYQGDGRVCTLTDICSVSNGGCHPDASCSSTLGSLPLCTCLPGYTGNGYGPNGCVQLSNICLSHPCLNGQCIDTVSGYFCKCDSGWTGVNCTENINECLSNPCLNGGTCVDGVDSFSCECTRLWTGALCQVPQQVCGESLSGINGSFSYRSPDVGYVHDVNCFWVIKTEMGKVLRITFTFFRLESMDNCPHEFLQVYDGDSSSAFQLGRFCGSSLPHELLSSDNALYFHLYSEHLRNGRGFTVRWETQQPECGGILTGPYGSIKSPGYPGNYPPGRDCVWIVVTSPDLLVTFTFGTLSLEHHDDCNKDYLEIRDGPLYQDPLLGKFCTTFSVPPLQTTGPFARIHFHSDSQISDQGFHITYLTSPSDLRCGGNYTDPEGELFLPELSGPFTHTRQCVYMMKQPQGEQIQINFTHVELQCQSDSSQNYIEVRDGETLLGKVCGNGTISHIKSITNSVWIRFKIDASVEKASFRAVYQVACGDELTGEGVIRSPFFPNVYPGERTCRWTIHQPQSQVILLNFTVFEIGSSAHCETDYVEIGSSSILGSPENKKYCGTDIPSFITSVYNFLYVTFVKSSSTENHGFMAKFSAEDLACGEILTESTGTIQSPGHPNVYPHGINCTWHILVQPNHLIHLMFETFHLEFHYNCTNDYLEVYDTDSETSLGRYCGKSIPPSLTSSGNSLMLVFVTDSDLAYEGFLINYEAISAATACLQDYTDDLGTFTSPNFPNNYPNNWECIYRITVRTGQLIAVHFTNFSLEEAIGNYYTDFLEIRDGGYEKSPLLGIFYGSNLPPTIISHSNKLWLKFKSDQIDTRSGFSAYWDGSSTGCGGNLTTSSGTFISPNYPMPYYHSSECYWWLKSSHGSAFELEFKDFHLEHHPNCTLDYLAVYDGPSSNSHLLTQLCGDEKPPLIRSSGDSMFIKLRTDEGQQGRGFKAEYRQTCENVVIVNQTYGILESIGYPNPYSENQHCNWTIRATTGNTVNYTFLAFDLEHHINCSTDYLELYDGPRQMGRYCGVDLPPPGSTTSSKLQVLLLTDGVGRREKGFQMQWFVYGCGGELSGATGSFSSPGFPNRYPPNKECIWYIRTDPGSSIQLTIHDFDVEYHSRCNFDVLEIYGGPDFHSPRIAQLCTQRSPENPMQVSSTGNELAIRFKTDLSINGRGFNASWQAVTGGCGGIFQAPSGEIHSPNYPSPYRSNTDCSWVIRVDRNHRVLLNFTDFDLEPQDSCIMAYDGLSSTMSRLARTCGREQLANPIVSSGNSLFLRFQSGPSRQNRGFRAQFRQACGGHILTSSFDTVSSPRFPANYPNNQNCSWIIQAQPPLNHITLSFTHFELERSTTCARDFVEILDGGHEDAPLRGRYCGTDMPHPITSFSSALTLRFVSDSSISAGGFHTTVTASVSACGGTFYMAEGIFNSPGYPDIYPPNVECVWNIVSSPGNRLQLSFISFQLEDSQDCSRDFVEIREGNATGHLVGRYCGNSFPLNYSSIVGHTLWVRFISDGSGSGTGFQATFMKIFGNDNIVGTHGKVASPFWPENYPHNSNYQWTVNVNASHVVHGRILEMDIEEIQNCYYDKLRIYDGPSIHARLIGAYCGTQTESFSSTGNSLTFHFYSDSSISGKGFLLEWFAVDAPDGVLPTIAPGACGGFLRTGDAPVFLFSPGWPDSYSNRVDCTWLIQAPDSTVELNILSLDIESHRTCAYDSLVIRDGDNNLAQQLAVLCGREIPGPIRSTGEYMFIRFTSDSSVTRAGFNASFHKSCGGYLHADRGIITSPKYPETYPSNLNCSWHVLVQSGLTIAVHFEQPFQIPNGDSSCNQGDYLVLRNGPDICSPPLGPPGGNGHFCGSHASSTLFTSDNQMFVQFISDHSNEGQGFKIKYEAKSLACGGNVYIHDADSAGYVTSPNHPHNYPPHADCIWILAAPPETRIQLQFEDRFDIEVTPNCTSNYLELRDGVDSDAPILSKFCGTSLPSSQWSSGEVMYLRFRSDNSPTHVGFKAKYSIAQCGGRVPGQSGVVESIGHPTLPYRDNLFCEWHLQGLSGHYLTISFEDFNLQNSSGCEKDFVEIWDNHTSGNILGRYCGNTIPDSIDTSSNTAVVRFVTDGSVTASGFRLRFESSMEECGGDLQGSIGTFTSPNYPNPNPHGRICEWRITAPEGRRITLMFNNLRLATHPSCNNEHVIVFNGIRSNSPQLEKLCSSVNVSNEIKSSGNTMKVIFFTDGSRPYGGFTASYTSSEDAVCGGSLPNTPEGNFTSPGYDGVRNYSRNLNCEWTLSNPNQGNSSISIHFEDFYLESHQDCQFDVLEFRVGDADGPLMWRLCGPSKPTLPLVIPYSQVWIHFVTNERVEHIGFHAKYSFTDCGGIQIGDSGVITSPNYPNAYDSLTHCSSLLEAPQGHTITLTFSDFDIEPHTTCAWDSVTVRNGGSPESPIIGQYCGNSNPRTIQSGSNQLVVTFNSDHSLQGGGFYATWNTQTLGCGGIFHSDNGTIRSPHWPQNFPENSRCSWTAITHKSKHLEISFDNNFLIPSGDGQCQNSFVKVWAGTEEVDKALLATGCGNVAPGPVITPSNTFTAVFQSQEAPAQGFSASFVSRCGSNFTGPSGYIISPNYPKQYDNNMNCTYVIEANPLSVVLLTFVSFHLEARSAVTGSCVNDGVHIIRGYSVMSTPFATVCGDEMPAPLTIAGPVLLNFYSNEQITDFGFKFSYRIISCGGVFNFSSGIITSPAYSYADYPNDMHCLYTITVSDDKVIELKFSDFDVVPSTSCSHDYLAIYDGANTSDPLLGKFCGSKRPPNVKSSNNSMLLVFKTDSFQTAKGWKMSFRQTLGPQQGCGGYLTGSNNTFASPDSDSNGMYDKNLNCVWIIIAPVNKVIHLTFNTFALEAASTRQRCLYDYVKLYDGDSENANLAGTFCGSTVPAPFISSGNFLTVQFISDLTLEREGFNATYTIMDMPCGGTYNATWTPQNISSPNSSDPDVPFSICTWVIDSPPHQQVKITVWALQLTSQDCTQNYLQLQDSPQGHGNSRFQFCGRNASAVPVFYSSMSTAMVIFKSGVVNRNSRMSFTYQIADCNRDYHKAFGNLRSPGWPDNYDNDKDCTVTLTAPQNHTISLFFHSLGIENSVECRNDFLEVRNGSNSNSPLLGKYCGTLLPNPVFSQNNELYLRFKSDSVTSDRGYEIIWTSSPSGCGGTLYGDRGSFTSPGYPGTYPNNTYCEWVLVAPAGRLVTINFYFISIDDPGDCVQNYLTLYDGPNASSPSSGPYCGGDTSIAPFVASSNQVFIKFHADYARRPSAFRLTWDS

SEQ ID NO: 106 - protein, 740 aa, Homo sapiens
  source 1..740: note = sp|Q9UQQ1|NALDL_HUMAN Aminopeptidase NAALADL1; OS = Homo sapiens OX=9606 GN=NAALADL1 PE=1 SV=2
MQWTKVLGLGLGAAALLGLGIILGHFAIPKKANSLAPQDLDLEILETVMGQLDAHRIRENLRELSREPHLASSPRDEDLVQLLLQRWKDPESGLDSAEASTYEVLLSFPSQEQPNVVDIVGPTGGIIHSCHRTEENVTGEQGGPDVVQPYAAYAPSGTPQGLLVYANRGAEEDFKELQTQGIKLEGTIALTRYGGVGRGAKAVNAAKHGVAGVLVYTDPADINDGLSSPDETFPNSWYLPPSGVERGSYYEYFGDPLTPYLPAVPSSFRVDLANVSGFPPIPTQPIGFQDARDLLCNLNGTLAPATWQGALGCHYRLGPGFRPDGDFPADSQVNVSVYNRLELRNSSNVLGIIRGAVEPDRYVLYGNHRDSWVHGAVDPSSGTAVLLELSRVLGTLLKKGTWRPRRSIVFASWGAEEFGLIGSTEFTEEFFNKLQERTVAYINVDISVFANATLRVQGTPPVQSVVFSATKEIRSPGPGDLSIYDNWIRYFNRSSPVYGLVPSLGSLGAGSDYAPFVHFLGISSMDIAYTYDRSKTSARIYPTYHTAFDTFDYVDKFLDPGFSSHQAVARTAGSVILRLSDSFFLPLKVSDYSETLRSFLQAAQQDLGALLEQHSISLGPLVTAVEKFEAEAAALGQRISTLQKGSPDPLQVRMLNDQLMLLERTFLNPRAFPEERYYSHVLWAPRTGSVVTFPGLSNACSRARDTASGSEAWAEVQRQLSIVVTALEGAAATLRPVADL

SEQ ID NO: 107 - protein, 90 aa, Homo sapiens
  source 1..90: note = sp|P62072|TIM10_HUMAN Mitochondrial import inner membrane translocase subunit Tim10 OS=Homo sapiens OX=9606; GN = TIMM10 PE=1 SV=1
MDPLRAQQLAAELEVEMMADMYNRMTSACHRKCVPPHYKEAELSKGESVCLDRCVSKYLDIHERMGKKLTELSMQDEELMKRVQQSSGPA

SEQ ID NO: 108 - protein, 505 aa, Homo sapiens
  source 1..505: note = sp|P51451|BLK_HUMAN Tyrosine-protein kinase Blk; OS = Homo sapiens OX=9606 GN=BLK PE=1 SV=3
MGLVSSKKPDKEKPIKEKDKGQWSPLKVSAQDKDAPPLPPLVVFNHLTPPPPDEHLDEDKHFVVALYDYTAMNDRDLQMLKGEKLQVLKGTGDWWLARSLVTGREGYVPSNFVARVESLEMERWFFRSQGRKEAERQLLAPINKAGSFLIRESETNKGAFSLSVKDVTTQGELIKHYKIRCLDEGGYYISPRITFPSLQALVQHYSKKGDGLCQRLTLPCVRPAPQNPWAQDEWEIPRQSLRLVRKLGSGQFGEVWMGYYKNNMKVAIKTLKEGTMSPEAFLGEANVMKALQHERLVRLYAVVTKEPIYIVTEYMARGCLLDFLKTDEGSRLSLPRLIDMSAQIAEGMAYIERMNSIHRDLRAANILVSEALCCKIADFGLARIIDSEYTAQEGAKFPIKWTAPEAIHFGVFTIKADVWSFGVLLMEVVTYGRVPYPGMSNPEVIRNLERGYRMPRPDTCPPELYRGVIAECWRSRPEERPTFEFLQSVLEDFYTATERQYELQP

SEQ ID NO: 109 - protein, 105 aa, Homo sapiens
  source 1..105: note = sp|O95178|NDUB2_HUMAN NADH dehydrogenase [ubiquinone] 1 beta subcomplex subunit 2, mitochondrial; OS = Homo sapiens OX=9606 GN=NDUFB2 PE=1 SV=1
MSALTRLASFARVGGRLFRSGCARTAGDGGVRHAGGGVHIEPRYRQFPQLTRSQVFQSEFFSGLMWFWILWRFWHDSEEVLGHFPYPDPSQWTDEELGIPPDDED

SEQ ID NO: 110 - protein, 1148 aa, Homo sapiens
  source 1..1148: note = sp|Q8TAB3|PCD19_HUMAN Protocadherin-19 OS=Homo sapiens OX=9606 GN=PCDH19 PE=1 SV=3
MESLLLPVLLLLAILWTQAAALINLKYSVEEEQRAGTVIANVAKDAREAGFALDPRQASAFRVVSNSAPHLVDINPSSGLLVTKQKIDRDLLCRQSPKCIISLEVMSSSMEICVIKVEIKDLNDNAPSFPAAQIELEISEAASPGTRIPLDSAYDPDSGSFGVQTYELTPNELFGLEIKTRGDGSRFAELVVEKSLDRETQSHYSFRITALDGGDPPRLGTVGLSIKVTDSNDNNPVFSESTYAVSVPENSPPNTPVIRLNASDPDEGTNGQVVYSFYGYVNDRTRELFQIDPHSGLVTVTGALDYEEGHVYELDVQAKDLGPNSIPAHCKVTVSVLDTNDNPPVINLLSVNSELVEVSESAPPGYVIALVRVSDRDSGLNGRVQCRLLGNVPFRLQEYESFSTILVDGRLDREQHDQYNLTIQARDGGVPMLQSAKSFTVLITDENDNHPHFSKPYYQVIVQENNTPGAYLLSVSARDPDLGLNGSVSYQIVPSQVRDMPVFTYVSINPNSGDIYALRSFNHEQTKAFEFKVLAKDGGLPSLQSNATVRVIILDVNDNTPVITAPPLINGTAEVYIPRNSGIGYLVTVVKAEDYDEGENGRVTYDMTEGDRGFFEIDQVNGEVRTTRTFGESSKSSYELIVVAHDHGKTSLSASALVLIYLSPALDAQESMGSVNLSLIFIIALGSIAGILFVTMIFVAIKCKRDNKEIRTYNCSNCLTITCLLGCFIKGQNSKCLHCISVSPISEEQDKKTEEKVSLRGKRIAEYSYGHQKKSSKKKKISKNDIRLVPRDVEETDKMNVVSCSSLTSSLNYFDYHQQTLPLGCRRSESTFLNVENQNTRNTSANHIYHHSFNSQGPQQPDLIINGVPLPETENYSFDSNYVNSRAHLIKSSSTFKDLEGNSLKDSGHEESDQTDSEHDVQRSLYCDTAVNDVLNTSVTSMGSQMPDHDQNEGFHCREECRILGHSDRCWMPRNPMPIRSKSPEHVRNIIALSIEATAADVEAYDDCGPTKRTFATFGKDVSDHPAEERPTLKGKRTVDVTICSPKVNSVIREAGNGCEAISPVTSPLHLKSSLPTKPSVSYTIALAPPARDLEQYVNNVNNGPTRPSEAEPRGADSEKVMHEVSPILKEGRNKESPGVKRLKDIVL

SEQ ID NO: 111 - protein, 199 aa, Homo sapiens
  source 1..199: note = sp|P31941|ABC3A_HUMAN DNA dC->dU-editing enzyme APOBEC-3A OS=Homo sapiens OX=9606 GN=APOBEC3A PE=1 SV=3
MEASPASGPRHLMDPHIFTSNFNNGIGRHKTYLCYEVERLDNGTSVKMDQHRGFLHNQAKNLLCGFYGRHAELRFLDLVPSLQLDPAQIYRVTWFISWSPCFSWGCAGEVRAFLQENTHVRLRIFAARIYDYDPLYKEALQMLRDAGAQVSIMTYDEFKHCWDTFVDHQGCPFQPWDGLDEHSQALSGRLRAILQNQGN

SEQ ID NO: 112 - protein, 156 aa, Homo sapiens
  source 1..156: note = sp|P52298|NCBP2_HUMAN Nuclear cap-binding protein subunit 2 OS=Homo sapiens OX=9606 GN=NCBP2 PE=1 SV=1
MSGGLLKALRSDSYVELSQYRDQHFRGDNEEQEKLLKKSCTLYVGNLSFYTTEEQIYELFSKSGDIKKIIMGLDKMKKTACGFCFVEYYSRADAENAMRYINGTRLDDRIIRTDWDAGFKEGRQYGRGRSGGQVRDEYRQDYDAGRGGYGKLAQNQ

SEQ ID NO: 113 - protein, 326 aa, Homo sapiens
  source 1..326: note = sp|P30542|AA1R_HUMAN Adenosine receptor A1 OS=Homo sapiens OX=9606 GN=ADORA1 PE=1 SV=1
MPPSISAFQAAYIGIEVLIALVSVPGNVLVIWAVKVNQALRDATFCFIVSLAVADVAVGALVIPLAILINIGPQTYFHTCLMVACPVLILTQSSILALLAIAVDRYLRVKIPLRYKMVVTPRRAAVAIAGCWILSFVVGLTPMFGWNNLSAVERAWAANGSMGEPVIKCEFEKVISMEYMVYFNFFVWVLPPLLLMVLIYLEVFYLIRKQLNKKVSASSGDPQKYYGKELKIAKSLALILFLFALSWLPLHILNCITLFCPSCHKPSILTYIAIFLTHGNSAMNPIVYAFRIQKFRVTFLKIWNDHFRCQPAPPIDEDLPEERPDD

SEQ ID NO: 114 - protein, 635 aa, Homo sapiens
  source 1..635: note = sp|Q9Y289|SC5A6_HUMAN Sodium-dependent multivitamin transporter OS=Homo sapiens OX=9606 GN=SLC5A6 PE=1 SV=2
MSVGVSTSAPLSPTSGTSVGMSTFSIMDYVVFVLLLVLSLAIGLYHACRGWGRHTVGELLMADRKMGCLPVALSLLATFQSAVAILGVPSEIYRFGTQYWFLGCCYFLGLLIPAHIFIPVFYRLHLTSAYEYLELRFNKTVRVCGTVTFIFQMVIYMGVVLYAPSLALNAVTGFDLWLSVLALGIVCTVYTALGGLKAVIWTDVFQTLVMFLGQLAVIIVGSAKVGGLGRVWAVASQHGRISGFELDPDPFVRHTFWTLAFGGVFMMLSLYGVNQAQVQRYLSSRTEKAAVLSCYAVFPFQQVSLCVGCLIGLVMFAYYQEYPMSIQQAQAAPDQFVLYFVMDLLKGLPGLPGLFIACLFSGSLSTISSAFNSLATVTMEDLIRPWFPEFSEARAIMLSRGLAFGYGLLCLGMAYISSQMGPVLQAAISIFGMVGGPLLGLFCLGMFFPCANPPGAVVGLLAGLVMAFWIGIGSIVTSMGSSMPPSPSNGSSFSLPTNLTVATVTTLMPLTTFSKPTGLQRFYSLSYLWYSAHNSTTVIVVGLIVSLLTGRMRGRSLNPATIYPVLPKLLSLLPLSCQKRLHCRSYGQDHLDTGLFPEKPRNGVLGDSRDKEAMALDGTAYQGSSSTCILQETSL

SEQ ID NO: 115 - protein, 608 aa, Homo sapiens
  source 1..608: note = sp|Q86YW0|PLCZ1_HUMAN 1-phosphatidylinositol 4,5-bisphosphate phosphodiesterase zeta-1 OS=Homo sapiens; OX = 9606 GN=PLCZ1 PE=1 SV=1
MEMRWFLSKIQDDFRGGKINLEKTQRLLEKLDIRCSYIHVKQIFKDNDRLKQGRITIEEFRAIYRIITHREEIIEIFNTYSENRKILLASNLAQFLTQEQYAAEMSKAIAFEIIQKYEPIEEVRKAHQMSLEGFTRYMDSRECLLFKNECRKVYQDMTHPLNDYFISSSHNTYLVSDQLLGPSDLWGYVSALVKGCRCLEIDCWDGAQNEPVVYHGYTLTSKLLFKTVIQAIHKYAFMTSDYPVVLSLENHCSTAQQEVMADNLQATFGESLLSDMLDDFPDTLPSPEALKFKILVKNKKIGTLKETHERKGSDKRGDNQDKETGVKKLPGVMLFKKKKTRKLKIALALSDLVIYTKAEKFKSFQHSRLYQQFNENNSIGETQARKLSKLRVHEFIFHTRKFITRIYPKATRADSSNFNPQEFWNIGCQMVALNFQTPGLPMDLQNGKFLDNGGSGYILKPHFLRESKSYFNPSNIKEGMPITLTIRLISGIQLPLTHSSSNKGDSLVIIEVFGVPNDQMKQQTRVIKKNAFSPRWNETFTFIIHVPELALIRFVVEGQGLIAGNEFLGQYTLPLLCMNKGYRRIPLFSRMGESLEPASLFVYVWYVR

SEQ ID NO: 116 - protein, 253 aa, Homo sapiens
  source 1..253: note = sp|O75937|DNJC8_HUMAN DnaJ homolog subfamily C member 8 OS=Homo sapiens OX=9606 GN=DNAJC8 PE=1 SV=2
MAASGESGTSGGGGSTEEAFMTFYSEVKQIEKRDSVLTSKNQIERLTRPGSSYFNLNPFEVLQIDPEVTDEEIKKRFRQLSILVHPDKNQDDADRAQKAFEAVDKAYKLLLDQEQKKRALDVIQAGKEYVEHTVKERKKQLKKEGKPTIVEEDDPELFKQAVYKQTMKLFAELEIKRKEREAKEMHERKRQREEEIEAQEKAKREREWQKNFEESRDGRVDSWRNFQANTKGKKEKKNRTFLRPPKVKMEQRE

SEQ ID NO: 117 - protein, 463 aa, Homo sapiens
  source 1..463: note = sp|P43220|GLP1R_HUMAN Glucagon-like peptide 1 receptor OS=Homo sapiens OX=9606 GN=GLP1R PE=1 SV=2
MAGAPGPLRLALLLLGMVGRAGPRPQGATVSLWETVQKWREYRRQCQRSLTEDPPPATDLFCNRTFDEYACWPDGEPGSFVNVSCPWYLPWASSVPQGHVYRFCTAEGLWLQKDNSSLPWRDLSECEESKRGERSSPEEQLLFLYIIYTVGYALSFSALVIASAILLGFRHLHCTRNYIHLNLFASFILRALSVFIKDAALKWMYSTAAQQHQWDGLLSYQDSLSCRLVFLLMQYCVAANYYWLLVEGVYLYTLLAFSVLSEQWIFRLYVSIGWGVPLLFVVPWGIVKYLYEDEGCWTRNSNMNYWLIIRLPILFAIGVNFLIFVRVICIVVSKLKANLMCKTDIKCRLAKSTLTLIPLLGTHEVIFAFVMDEHARGTLRFIKLFTELSFTSFQGLMVAILYCFVNNEVQLEFRKSWERWRLEHLHIQRDSSMKPLKCPTSSLSSGATAGSSMYTATCQASCS

SEQ ID NO: 118 - protein, 828 aa, Homo sapiens
  source 1..828: note = sp|Q7Z4V0|ZN438_HUMAN Zinc finger protein 438; OS = Homo sapiens OX=9606 GN=ZNF438 PE=1 SV=1
MQNSVSVPPKDEGESNIPSGTIQSRKGLQNKSQFRTIAPKIVPKVLTSRMLPCHSPSRSDQVNLGPSINSKLLGMSTQNYALMQVAGQEGTFSLVALPHVASAQPIQKPRMSLPENLKLPIPRYQPPRNSKASRKKPILIFPKSGCSKAPAQTQMCPQMSPSPPHHPELLYKPSPFEEVPSLEQAPASISTAALTNGSDHGDLRPPVTNTHGSLNPPATPASSTPEEPAKQDLTALSGKAHFVSKITSSKPSAVASEKFKEQVDLAKTMTNLSPTILGNAVQLISSVPKGKLPIPPYSRMKTMEVYKIKSDANIAGFSLPGPKADCDKIPSTTEGFNAATKVASRLPVPQVSQQSACESAFCPPTKLDLNHKTKLNSGAAKRKGRKRKVPDEILAFQGKRRKYIINKCRDGKERVKNDPQEFRDQKLGTLKKYRSIMPKPIMVIPTLASLASPTTLQSQMLGGLGQDVLLNNSLTPKYLGCKQDNSSSPKPSSVFRNGFSGIKKPWHRCHVCNHHFQFKQHLRDHMNTHTNRRPYSCRICRKSYVRPGSLSTHMKLHHGENRLKKLMCCEFCAKVFGHIRVYFGHLKEVHRVVISTEPAPSELQPGDIPKNRDMSVRGMEGSLERENKSNLEEDFLLNQADEVKLQIKCGRCQITAQSFAEIKFHLLDVHGEEIEGRLQEGTFPGSKGTQEELVQHASPDWKRHPERGKPEKVHSSSEESHACPRLKRQLHLHQNGVEMLMENEGPQSGTNKPRETCQGPECPGLHTFLLWSHSGFNCLLCAEMLGRKEDLLHHWKHQHNCEDPSKLWAILNTVSNQGVIELSSEAEK

SEQ ID NO: 119 - protein, 505 aa, Homo sapiens
  source 1..505: note = sp|P42685|FRK_HUMAN Tyrosine-protein kinase FRK; OS = Homo sapiens OX=9606 GN=FRK PE=1 SV=1
MSNICQRLWEYLEPYLPCLSTEADKSTVIENPGALCSPQSQRHGHYFVALFDYQARTAEDLSFRAGDKLQVLDTLHEGWWFARHLEKRRDGSSQQLQGYIPSNYVAEDRSLQAEPWFFGAIGRSDAEKQLLYSENKTGSFLIRESESQKGEFSLSVLDGAVVKHYRIKRLDEGGFFLTRRRIFSTLNEFVSHYTKTSDGLCVKLGKPCLKIQVPAPFDLSYKTVDQWEIDRNSIQLLKRLGSGQFGEVWEGLWNNTTPVAVKTLKPGSMDPNDFLREAQIMKNLRHPKLIQLYAVCTLEDPIYIITELMRHGSLQEYLQNDTGSKIHLTQQVDMAAQVASGMAYLESRNYIHRDLAARNVLVGEHNIYKVADFGLARVFKVDNEDIYESRHEIKLPVKWTAPEAIRSNKFSIKSDVWSFGILLYEIITYGKMPYSGMTGAQVIQMLAQNYRLPQPSNCPQQFYNIMLECWNAEPKERPTFETLRWKLEDYFETDSSYSDANNFIR

SEQ ID NO: 120 - protein, 445 aa, Homo sapiens
  source 1..445: note = sp|Q9HAB3|S52A2_HUMAN Solute carrier family 52, riboflavin transporter, member 2 OS=Homo sapiens OX=9606; GN = SLC52A2 PE=1 SV=1
MAAPTPARPVLTHLLVALFGMGSWAAVNGIWVELPVVVKELPEGWSLPSYVSVLVALGNLGLLVVTLWRRLAPGKDEQVPIRVVQVLGMVGTALLASLWHHVAPVAGQLHSVAFLALAFVLALACCASNVTFLPFLSHLPPRFLRSFFLGQGLSALLPCVLALVQGVGRLECPPAPINGTPGPPLDFLERFPASTFFWALTALLVASAAAFQGLLLLLPPPPSVPTGELGSGLQVGAPGAEEEVEESSPLQEPPSQAAGTTPGPDPKAYQLLSARSACLLGLLAATNALTNGVLPAVQSFSCLPYGRLAYHLAVVLGSAANPLACFLAMGVLCRSLAGLGGLSLLGVFCGGYLMALAVLSPCPPLVGTSAGVVLVVLSWVLCLGVFSYVKVAASSLLHGGGRPALLAAGVAIQVGSLLGAVAMFPPTSIYHVFHSRKDCADPCDS

SEQ ID NO: 121 - protein, 588 aa, Homo sapiens
  source 1..588: note = sp|O43781|DYRK3_HUMAN Dual specificity tyrosine-phosphorylation-regulated kinase 3 OS=Homo sapiens OX=9606 GN=DYRK3 PE=1 SV=3
MGGTARGPGRKDAGPPGAGLPPQQRRLGDGVYDTFMMIDETKCPPCSNVLCNPSEPPPPRRLNMTTEQFTGDHTQHFLDGGEMKVEQLFQEFGNRKSNTIQSDGISDSEKCSPTVSQGKSSDCLNTVKSNSSSKAPKVVPLTPEQALKQYKHHLTAYEKLEIINYPEIYFVGPNAKKRHGVIGGPNNGGYDDADGAYIHVPRDHLAYRYEVLKIIGKGSFGQVARVYDHKLRQYVALKMVRNEKRFHRQAAEEIRILEHLKKQDKTGSMNVIHMLESFTFRNHVCMAFELLSIDLYELIKKNKFQGFSVQLVRKFAQSILQSLDALHKNKIIHCDLKPENILLKHHGRSSTKVIDFGSSCFEYQKLYTYIQSRFYRAPEIILGSRYSTPIDIWSFGCILAELLTGQPLFPGEDEGDQLACMMELLGMPPPKLLEQSKRAKYFINSKGIPRYCSVTTQADGRVVLVGGRSRRGKKRGPPGSKDWGTALKGCDDYLFIEFLKRCLHWDPSARLTPAQALRHPWISKSVPRPLTTIDKVSGKRVVNPASAFQGLGSKLPPVVGIANKLKANLMSETNGSIPLCSVLPKLIS

SEQ ID NO: 122 - protein, 145 aa, Homo sapiens
  source 1..145: note = sp|Q8TAP4|LMO3_HUMAN LIM domain only protein 3; OS = Homo sapiens OX=9606 GN=LMO3 PE=1 SV=1
MLSVQPDTKPKGCAGCNRKIKDRYLLKALDKYWHEDCLKCACCDCRLGEVGSTLYTKANLILCRRDYLRLFGVTGNCAACSKLIPAFEMVMRAKDNVYHLDCFACQLCNQRFCVGDKFFLKNNMILCQTDYEEGLMKEGYAPQVR

SEQ ID NO: 123 - protein, 780 aa, Homo sapiens
  source 1..780: note = sp|Q93034|CUL5_HUMAN Cullin-5 OS=Homo sapiens; OX = 9606 GN=CUL5 PE=1 SV=4
MATSNLLKNKGSLQFEDKWDFMRPIVLKLLRQESVTKQQWFDLFSDVHAVCLWDDKGPAKIHQALKEDILEFIKQAQARVLSHQDDTALLKAYIVEWRKFFTQCDILPKPFCQLEITLMGKQGSNKKSNVEDSIVRKLMLDTWNESIFSNIKNRLQDSAMKLVHAERLGEAFDSQLVIGVRESYVNLCSNPEDKLQIYRDNFEKAYLDSTERFYRTQAPSYLQQNGVQNYMKYADAKLKEEEKRALRYLETRRECNSVEALMECCVNALVTSFKETILAECQGMIKRNETEKLHLMFSLMDKVPNGIEPMLKDLEEHIISAGLADMVAAAETITTDSEKYVEQLLTLFNRFSKLVKEAFQDDPRFLTARDKAYKAVVNDATIFKLELPLKQKGVGLKTQPESKCPELLANYCDMLLRKTPLSKKLTSEEIEAKLKEVLLVLKYVQNKDVFMRYHKAHLTRRLILDISADSEIEENMVEWLREVGMPADYVNKLARMFQDIKVSEDLNQAFKEMHKNNKLALPADSVNIKILNAGAWSRSSEKVFVSLPTELEDLIPEVEEFYKKNHSGRKLHWHHLMSNGIITFKNEVGQYDLEVTTFQLAVLFAWNQRPREKISFENLKLATELPDAELRRTLWSLVAFPKLKRQVLLYEPQVNSPKDFTEGTLFSVNQEFSLIKNAKVQKRGKINLIGRLQLTTERMREEENEGIVQLRILRTQEAIIQIMKMRKKISNAQLQTELVEILKNMFLPQKKMIKEQIEWLIEHKYIRRDESDINTFIYMA

SEQ ID NO: 124 - protein, 636 aa, Homo sapiens
  source 1..636: note = sp|Q9NRJ5|PAPOB_HUMAN Poly(A) polymerase beta; OS = Homo sapiens OX=9606 GN=PAPOLB PE=2 SV=1
MPFPVTTQGPPQPAPPPNRYGVSSPISLAVPKETDCLLTQRLIETLRPFGVFEEEEELQRRILVLEKLNNLVKEWIREISESKSLPQSVIENVGGKIFTFGSYRLGVHTKGADIDALCVAPSHVDRSDFFTSFYAKLKLQEEVKDLRAVEEAFVPVIKLCFDGIEIDILFARLALQTIPEDLDLRDDSLLKNLDIRCIRSLNGCRVTDEILHLVPNIDNFRLTLRAIKLWAKCHNIYSNILGFLGGVSWAMLVARTCQLYPNAVASTLVRKFFLVFSEWEWPNPVLLKEPEERNLNLPVWDPRVNPSDRYHLMPIITPAYPQQNSTYNVSISTRMVMIEEFKQGLAITHEILLSKAEWSKLFEAPSFFQKYKHYIVLLASASTEKQHLEWVGLVESKIRILVGSLEKNEFITLAHVNPQSFPAPKENPDMEEFRTMWVIGLGLKKPDNSEILSIDLTYDIQSFTDTVYRQAVNSKMFEMGMKITAMHLRRKELHQLLPHHVLQDKKAHSTEGRRLTDLNDSSFDLSAGCENSMSVPSSTSTMKTGPLISSSQGRNSPALAVMTASVANIQATEFSLQQVNTNESSGVALNESIPHAVSQPAISPSPKAMVARVVSSTCLISHPDLQETQQQTYLIL

SEQ ID NO: 125 - protein, 421 aa, Homo sapiens
  source 1..421: note = sp|Q8N9L9|ACOT4_HUMAN Peroxisomal succinyl-coenzyme A thioesterase OS=Homo sapiens OX=9606 GN=ACOT4 PE=1 SV=2
MSATLILEPPGRCCWNEPVRIAVRGLAPEQRVTLRASLRDEKGALFRAHARYCADARGELDLERAPALGGSFAGLEPMGLLWALEPEKPFWRFLKRDVQIPFVVELEVLDGHDPEPGRLLCQAQHERHFLPPGVRRQSVRAGRVRATLFLPPGPGPFPGIIDIFGIGGGLLEYRASLLAGHGFATLALAYYNFEDLPNNMDNISLEYFEEAVCYMLQHPQVKGPGIGLLGISLGADICLSMASFLKNVSATVSINGSGISGNTAINYKHSSIPPLGYDLRRIKVAFSGLVDIVDIRNALVGGYKNPSMIPIEKAQGPILLIVGQDDHNWRSELYAQTVSERLQAHGKEKPQIICYPGTGHYIEPPYFPLCPASLHRLLNKHVIWGGEPRAHSKAQEDAWKQILAFFCKHLGGTQKTAVPKL

SEQ ID NO: 126 - protein, 209 aa, Homo sapiens
  source 1..209: note = sp|O14493|CLD4_HUMAN Claudin-4 OS=Homo sapiens; OX = 9606 GN=CLDN4 PE=1 SV=1
MASMGLQVMGIALAVLGWLAVMLCCALPMWRVTAFIGSNIVTSQTIWEGLWMNCVVQSTGQMQCKVYDSLLALPQDLQAARALVIISIIVAALGVLLSVVGGKCTNCLEDESAKAKTMIVAGVVFLLAGLMVIVPVSWTAHNIIQDFYNPLVASGQKREMGASLYVGWAASGLLLLGGGLLCCNCPPRTDKPYSAKYSAARSAAASNYV

SEQ ID NO: 127 - protein, 503 aa, Homo sapiens
  source 1..503: note = sp|P11511|CP19A_HUMAN Aromatase OS=Homo sapiens; OX = 9606 GN=CYP19A1 PE=1 SV=3
MVLEMLNPIHYNITSIVPEAMPAATMPVLLLTGLFLLVWNYEGTSSIPGPGYCMGIGPLISHGRFLWMGIGSACNYYNRVYGEFMRVWISGEETLIISKSSSMFHIMKHNHYSSRFGSKLGLQCIGMHEKGIIFNNNPELWKTTRPFFMKALSGPGLVRMVTVCAESLKTHLDRLEEVTNESGYVDVLTLLRRVMLDTSNTLFLRIPLDESAIVVKIQGYFDAWQALLIKPDIFFKISWLYKKYEKSVKDLKDAIEVLIAEKRRRISTEEKLEECMDFATELILAEKRGDLTRENVNQCILEMLIAAPDTMSVSLFFMLFLIAKHPNVEEAIIKEIQTVIGERDIKIDDIQKLKVMENFIYESMRYQPVVDLVMRKALEDDVIDGYPVKKGTNIILNIGRMHRLEFFPKPNEFTLENFAKNVPYRYFQPFGFGPRGCAGKYIAMVMMKAILVTLLRRFHVKTLQGQCVESIQKIHDLSLHPDETKNMLEMIFTPRNSDRCLEH

SEQ ID NO: 128 - protein, 781 aa, Homo sapiens
  source 1..781: note = sp|Q08AN1|ZN616_HUMAN Zinc finger protein 616; OS = Homo sapiens OX=9606 GN=ZNF616 PE=2 SV=2
MATQGHLTFKDVAIEFSQEEWKCLEPVQKALYKDVMLENYRNLVFLGISPKCVIKELPPTENSNTGERFQTVALERHQSYDIENLYFREIQKHLHDLEFQWKDGETNDKEVPVPHENNLTGKRDQHSQGDVENNHIENQLTSNFESRLAELQKVQTEGRLYECNETEKTGNNGCLVSPHIREKTYVCNECGKAFKASSSLINHQRIHTTEKPYKCNECGKAFHRASLLTVHKVVHTRGKSYQCDVCGKIFRKNSYFVRHQRSHTGQKPYICNECGKSFSKSSHLAVHQRIHTGEKPYKCNLCGKSFSQRVHLRLHQTVHTGERPFKCNECGKTFKRSSNLTVHQVIHAGKKPYKCDVCGKAFRHRSNLVCHRRIHSGEKQYKCNECGKVFSKRSSLAVHRRIHTVEKPCKCNECGKVFSKRSSLAVHQRIHTGQKTYKCNKCGKVYSKHSHLAVHWRIHTGEKAYKCNECGKVFSIHSRLAAHQRIHTGEKPYKCNECGKVFSQHSRLAVHRRIHTGEKPYKCKECGKVFSDRSAFARHRRIHTGEKPYKCKECGKVFSQCSRLTVHRRIHSGEKPYKCNECGKVYSQYSHLVGHRRVHTGEKPYKCHECGKAFNQGSTLNRHQRIHTGEKPYKCNQCGNSFSQRVHLRLHQTVHTGDRPYKCNECGKTFKRSSNLTAHQIIHAGKKPYKCDECGKVFRHSSHLVSHQRIHTGEKRYKCIECGKAFGRLFSLSKHQRIHSGKKPYKCNECGKSFICRSGLTKHRIRHTGESLTTKLNVTRP

SEQ ID NO: 129 - protein, 575 aa, Homo sapiens
  source 1..575: note = sp|O95817|BAG3_HUMAN BAG family molecular chaperone regulator 3 OS=Homo sapiens OX=9606 GN=BAG3 PE=1 SV=3
MSAATHSPMMQVASGNGDRDPLPPGWEIKIDPQTGWPFFVDHNSRTTTWNDPRVPSEGPKETPSSANGPSREGSRLPPAREGHPVYPQLRPGYIPIPVLHEGAENRQVHPFHVYPQPGMQRFRTEAAAAAPQRSQSPLRGMPETTQPDKQCGQVAAAAAAQPPASHGPERSQSPAASDCSSSSSSASLPSSGRSSLGSHQLPRGYISIPVIHEQNVTRPAAQPSFHQAQKTHYPAQQGEYQTHQPVYHKIQGDDWEPRPLRAASPFRSSVQGASSREGSPARSSTPLHSPSPIRVHTVVDRPQQPMTHRETAPVSQPENKPESKPGPVGPELPPGHIPIQVIRKEVDSKPVSQKPPPPSEKVEVKVPPAPVPCPPPSPGPSAVPSSPKSVATEERAAPSTAPAEATPPKPGEAEAPPKHPGVLKVEAILEKVQGLEQAVDNFEGKKTDKKYLMIEEYLTKELLALDSVDPEGRADVRQARRDGVRKVQTILEKLEQKAIDVPGQVQVYELQPSNLEADQPLQAIMEMGAVAADKGKKNAGNAEDPHTETQQPEATAAATSNPSSMTDTPGNPAAP

SEQ ID NO: 130 - protein, 414 aa, Homo sapiens
  source 1..414: note = sp|Q13572|ITPK1_HUMAN Inositol-tetrakisphosphate 1-kinase OS=Homo sapiens OX=9606 GN=ITPK1 PE=1 SV=2
MQTFLKGKRVGYWLSEKKIKKLNFQAFAELCRKRGMEVVQLNLSRPIEEQGPLDVIIHKLTDVILEADQNDSQSLELVHRFQEYIDAHPETIVLDPLPAIRTLLDRSKSYELIRKIEAYMEDDRICSPPFMELTSLCGDDTMRLLEKNGLTFPFICKTRVAHGTNSHEMAIVFNQEGLNAIQPPCVVQNFINHNAVLYKVFVVGESYTVVQRPSLKNFSAGTSDRESIFFNSHNVSKPESSSVLTELDKIEGVFERPSDEVIRELSRALRQALGVSLFGIDIIINNQTGQHAVIDINAFPGYEGVSEFFTDLLNHIATVLQGQSTAMAATGDVALLRHSKLLAEPAGGLVGERTCSASPGCCGSMMGQDAPWKAEADAGGTAKLPHQRLGCNAGVSPSFQQHCVASLATKASSQ

SEQ ID NO: 131 - protein, 416 aa, Homo sapiens
  source 1..416: note = sp|Q9UIH9|KLF15_HUMAN Krueppel-like factor 15; OS = Homo sapiens OX=9606 GN=KLF15 PE=1 SV=1
MVDHLLPVDENFSSPKCPVGYLGDRLVGRRAYHMLPSPVSEDDSDASSPCSCSSPDSQALCSCYGGGLGTESQDSILDFLLSQATLGSGGGSGSSIGASSGPVAWGPWRRAAAPVKGEHFCLPEFPLGDPDDVPRPFQPTLEEIEEFLEENMEPGVKEVPEGNSKDLDACSQLSAGPHKSHLHPGSSGRERCSPPPGGASAGGAQGPGGGPTPDGPIPVLLQIQPVPVKQESGTGPASPGQAPENVKVAQLLVNIQGQTFALVPQVVPSSNLNLPSKFVRIAPVPIAAKPVGSGPLGPGPAGLLMGQKFPKNPAAELIKMHKCTFPGCSKMYTKSSHLKAHLRRHTGEKPFACTWPGCGWRFSRSDELSRHRRSHSGVKPYQCPVCEKKFARSDHLSKHIKVHRFPRSSRSVRSVN

SEQ ID NO: 132 - protein, 780 aa, Homo sapiens
  source 1..780: note = sp|O75157|T22D2_HUMAN TSC22 domain family protein 2; OS = Homo sapiens OX=9606 GN=TSC22D2 PE=1 SV=3
MSKMPAKKKSCFQITSVTTAQVATSITEDTESLDDPDESRTEDVSSEIFDVSRATDYGPEEVCERSSSEETLNNVGDAETPGTVSPNLLLDGQLAAAAAAPANGGGVVSARSVSGALASTLAAAATSAPAPGAPGGPQLAGSSAGPVTAAPSQPPTTCSSRFRVIKLDHGSGEPYRRGRWTCMEYYERDSDSSVLTRSGDCIRHSSTFDQTAERDSGLGATGGSVVVVVASMQGAHGPESGTDSSLTAVSQLPPSEKMSQPTPAQPQSFSVGQPQPPPPPVGGAVAQSSAPLPPFPGAATGPQPMMAAAQPSQPQGAGPGGQTLPPTNVTLAQPAMSLPPQPGPAVGAPAAQQPQQFAYPQPQIPPGHLLPVQPSGQSEYLQQHVAGLQPPSPAQPSSTGAAASPATAATLPVGTGQNASSVGAQLMGASSQPSEAMAPRTGPAQGGQVAPCQPTGVPPATVGGVVQPCLGPAGAGQPQSVPPPQMGGSGPLSAVPGGPHAVVPGVPNVPAAVPAPSVPSVSTTSVTMPNVPAPLAQSQQLSSHTPVSRSSSIIQHVGLPLAPGTHSAPTSLPQSDLSQFQTQTQPLVGQVDDTRRKSEPLPQPPLSLIAENKPVVKPPVADSLANPLQLTPMNSLATSVFSIAIPVDGDEDRNPSTAFYQAFHLNTLKESKSLWDSASGGGVVAIDNKIEQAMDLVKSHLMYAVREEVEVLKEQIKELVERNSLLERENALLKSLSSNDQLSQLPTQQANPGSTSQQQAVIAQPPQPTQPPQQPNVSSA

SEQ ID NO: 133 - protein, 477 aa, Homo sapiens
  source 1..477: note = sp|P21918|DRD5_HUMAN D(1B) dopamine receptor OS=Homo sapiens OX=9606 GN=DRD5 PE=1 SV=2
MLPPGSNGTAYPGQFALYQQLAQGNAVGGSAGAPPLGPSQVVTACLLTLLIIWTLLGNVLVCAAIVRSRHLRANMTNVFIVSLAVSDLFVALLVMPWKAVAEVAGYWPFGAFCDVWVAFDIMCSTASILNLCVISVDRYWAISRPFRYKRKMTQRMALVMVGLAWTLSILISFIPVQLNWHRDQAASWGGLDLPNNLANWTPWEEDFWEPDVNAENCDSSLNRTYAISSSLISFYIPVAIMIVTYTRIYRIAQVQIRRISSLERAAEHAQSCRSSAACAPDTSLRASIKKETKVLKTLSVIMGVFVCCWLPFFILNCMVPFCSGHPEGPPAGFPCVSETTFDVFVWFGWANSSLNPVIYAFNADFQKVFAQLLGCSHFCSRTPVETVNISNELISYNQDIVFHKEIAAAYIHMMPNAVTPGNREVDNDEEEGPFDRMFQIYQTSPDGDPVAESVWELDCEGEISLDKITPFTPNGFH

SEQ ID NO: 134 - protein, 2442 aa, Homo sapiens
  source 1..2442: note = sp|Q92793|CBP_HUMAN CREB-binding protein OS=Homo sapiens OX=9606 GN=CREBBP PE=1 SV=3
MAENLLDGPPNPKRAKLSSPGFSANDSTDFGSLFDLENDLPDELIPNGGELGLLNSGNLVPDAASKHKQLSELLRGGSGSSINPGIGNVSASSPVQQGLGGQAQGQPNSANMASLSAMGKSPLSQGDSSAPSLPKQAASTSGPTPAASQALNPQAQKQVGLATSSPATSQTGPGICMNANFNQTHPGLLNSNSGHSLINQASQGQAQVMNGSLGAAGRGRGAGMPYPTPAMQGASSSVLAETLTQVSPQMTGHAGLNTAQAGGMAKMGITGNTSPFGQPFSQAGGQPMGATGVNPQLASKQSMVNSLPTFPTDIKNTSVTNVPNMSQMQTSVGIVPTQAIATGPTADPEKRKLIQQQLVLLLHAHKCQRREQANGEVRACSLPHCRTMKNVLNHMTHCQAGKACQVAHCASSRQIISHWKNCTRHDCPVCLPLKNASDKRNQQTILGSPASGIQNTIGSVGTGQQNATSLSNPNPIDPSSMQRAYAALGLPYMNQPQTQLQPQVPGQQPAQPQTHQQMRTLNPLGNNPMNIPAGGITTDQQPPNLISESALPTSLGATNPLMNDGSNSGNIGTLSTIPTAAPPSSTGVRKGWHEHVTQDLRSHLVHKLVQAIFPTPDPAALKDRRMENLVAYAKKVEGDMYESANSRDEYYHLLAEKIYKIQKELEEKRRSRLHKQGILGNQPALPAPGAQPPVIPQAQPVRPPNGPLSLPVNRMQVSQGMNSFNPMSLGNVQLPQAPMGPRAASPMNHSVQMNSMGSVPGMAISPSRMPQPPNMMGAHTNNMMAQAPAQSQFLPQNQFPSSSGAMSVGMGQPPAQTGVSQGQVPGAALPNPLNMLGPQASQLPCPPVTQSPLHPTPPPASTAAGMPSLQHTTPPGMTPPQPAAPTQPSTPVSSSGQTPTPTPGSVPSATQTQSTPTVQAAAQAQVTPQPQTPVQPPSVATPQSSQQQPTPVHAQPPGTPLSQAAASIDNRVPTPSSVASAETNSQQPGPDVPVLEMKTETQAEDTEPDPGESKGEPRSEMMEEDLQGASQVKEETDIAEQKSEPMEVDEKKPEVKVEVKEEEESSSNGTASQSTSPSQPRKKIFKPEELRQALMPTLEALYRQDPESLPFRQPVDPQLLGIPDYFDIVKNPMDLSTIKRKLDTGQYQEPWQYVDDVWLMFNNAWLYNRKTSRVYKFCSKLAEVFEQEIDPVMQSLGYCCGRKYEFSPQTLCCYGKQLCTIPRDAAYYSYQNRYHFCEKCFTEIQGENVTLGDDPSQPQTTISKDQFEKKKNDTLDPEPFVDCKECGRKMHQICVLHYDIIWPSGFVCDNCLKKTGRPRKENKFSAKRLQTTRLGNHLEDRVNKFLRRQNHPEAGEVFVRVVASSDKTVEVKPGMKSRFVDSGEMSESFPYRTKALFAFEEIDGVDVCFFGMHVQEYGSDCPPPNTRRVYISYLDSIHFFRPRCLRTAVYHEILIGYLEYVKKLGYVTGHIWACPPSEGDDYIFHCHPPDQKIPKPKRLQEWYKKMLDKAFAERIIHDYKDIFKQATEDRLTSAKELPYFEGDFWPNVLEESIKELEQEEEERKKEESTAASETTEGSQGDSKNAKKKNNKKTNKNKSSISRANKKKPSMPNVSNDLSQKLYATMEKHKEVFFVIHLHAGPVINTLPPIVDPDPLLSCDLMDGRDAFLTLARDKHWEFSSLRRSKWSTLCMLVELHTQGQDRFVYTCNECKHHVETRWHCTVCEDYDLCINCYNTKSHAHKMVKWGLGLDDEGSSQGEPQSKSPQESRRLSIQRCIQSLVHACQCRNANCSLPSCQKMKRVVQHTKGCKRKTNGGCPVCKQLIALCCYHAKHCQENKCPVPFCLNIKHKLRQQQIQHRLQQAQLMRRRMATMNTRNVPQQSLPSPTSAPPGTPTQQPSTPQTPQPPAQPQPSPVSMSPAGFPSVARTQPPTTVSTGKPTSQVPAPPPPAQPPPAAVEAARQIEREAQQQQHLYRVNINNSMPPGRTGMGTPGSQMAPVSLNVPRPNQVSGPVMPSMPPGQWQQAPLPQQQPMPGLPRPVISMQAQAAVAGPRMPSVQPPRSISPSALQDLLRTLKSPSSPQQQQQVLNILKSNPQLMAAFIKQRTAKYVANQPGMQPQPGLQSQPGMQPQPGMHQQPSLQNLNAMQAGVPRPGVPPQQQAMGGLNPQGQALNIMNPGHNPNMASMNPQYREMLRRQLLQQQQQQQQQQQQQQQQQQGSAGMAGGMAGHGQFQQPQGPGGYPPAMQQQQRMQQHLPLQGSSMGQMAAQMGQLGQMGQPGLGADSTPNIQQALQQRILQQQQMKQQIGSPGQPNPMSPQQHMLSGQPQASHLPGQQIATSLSNQVRSPAPVQSPRPQSQPPHSSPSPRIQPQPSPHHVSPQTGSPHPGLAVTMASSIDQGHLGNPEQSAMLPQLNTPSRSALSSELSLVGDTTGDTLEKFVEGL

SEQ ID NO: 135 - protein, 340 aa, Homo sapiens
  source 1..340: note = sp|P28358|HXD10_HUMAN Homeobox protein Hox-D10; OS = Homo sapiens OX=9606 GN=HOXD10 PE=1 SV=2
MSFPNSSPAANTFLVDSLISACRSDSFYSSSASMYMPPPSADMGTYGMQTCGLLPSLAKREVNHQNMGMNVHPYIPQVDSWTDPNRSCRIEQPVTQQVPTCSFTTNIKEESNCCMYSDKRNKLISAEVPSYQRLVPESCPVENPEVPVPGYFRLSQTYATGKTQEYNNSPEGSSTVMLQLNPRGAAKPQLSAAQLQMEKKMNEPVSGQEPTKVSQVESPEAKGGLPEERSCLAEVSVSSPEVQEKESKEEIKSDTPTSNWLTAKSGRKKRCPYTKHQTLELEKEFLFNMYLTRERRLEISKSVNLTDRQVKIWFQNRRMKLKKMSRENRIRELTANLTFS

SEQ ID NO: 136 - protein, 309 aa, Homo sapiens
  source 1..309: note = sp|Q7Z6W7|DNJB7_HUMAN DnaJ homolog subfamily B member 7 OS=Homo sapiens OX=9606 GN=DNAJB7 PE=2 SV=2
MVDYYEVLGLQRYASPEDIKKAYHKVALKWHPDKNPENKEEAERKFKEVAEAYEVLSNDEKRDIYDKYGTEGLNGGGSHFDDECEYGFTFHKPDDVFKEIFHERDPFSFHFFEDSLEDLLNRPGSSYGNRNRDAGYFFSTASEYPIFEKFSSYDTGYTSQGSLGHEGLTSFSSLAFDNSGMDNYISVTTSDKIVNGRNINTKKIIESDQEREAEDNGELTFFLVNSVANEEGFAKECSWRTQSFNNYSPNSHSSKHVSQYTFVDNDEGGISWVTSNRDPPIFSAGVKEGGKRKKKKRKEVQKKSTKRNC

SEQ ID NO: 137 - protein, 1786 aa, Homo sapiens
  source 1..1786: note = sp|P07942|LAMB1_HUMAN Laminin subunit beta-1 OS=Homo sapiens OX=9606 GN=LAMB1 PE=1 SV=2
MGLLQLLAFSFLALCRARVRAQEPEFSYGCAEGSCYPATGDLLIGRAQKLSVTSTCGLHKPEPYCIVSHLQEDKKCFICNSQDPYHETLNPDSHLIENVVTTFAPNRLKIWWQSENGVENVTIQLDLEAEFHFTHLIMTFKTFRPAAMLIERSSDFGKTWGVYRYFAYDCEASFPGISTGPMKKVDDIICDSRYSDIEPSTEGEVIFRALDPAFKIEDPYSPRIQNLLKITNLRIKFVKLHTLGDNLLDSRMEIREKYYYAVYDMVVRGNCFCYGHASECAPVDGFNEEVEGMVHGHCMCRHNTKGLNCELCMDFYHDLPWRPAEGRNSNACKKCNCNEHSISCHFDMAVYLATGNVSGGVCDDCQHNTMGRNCEQCKPFYYQHPERDIRDPNFCERCTCDPAGSQNEGICDSYTDFSTGLIAGQCRCKLNVEGEHCDVCKEGFYDLSSEDPFGCKSCACNPLGTIPGGNPCDSETGHCYCKRLVTGQHCDQCLPEHWGLSNDLDGCRPCDCDLGGALNNSCFAESGQCSCRPHMIGRQCNEVEPGYYFATLDHYLYEAEEANLGPGVSIVERQYIQDRIPSWTGAGFVRVPEGAYLEFFIDNIPYSMEYDILIRYEPQLPDHWEKAVITVQRPGRIPTSSRCGNTIPDDDNQVVSLSPGSRYVVLPRPVCFEKGTNYTVRLELPQYTSSDSDVESPYTLIDSLVLMPYCKSLDIFTVGGSGDGVVTNSAWETFQRYRCLENSRSVVKTPMTDVCRNIIFSISALLHQTGLACECDPQGSLSSVCDPNGGQCQCRPNVVGRTCNRCAPGTFGFGPSGCKPCECHLQGSVNAFCNPVTGQCHCFQGVYARQCDRCLPGHWGFPSCQPCQCNGHADDCDPVTGECLNCQDYTMGHNCERCLAGYYGDPIIGSGDHCRPCPCPDGPDSGRQFARSCYQDPVTLQLACVCDPGYIGSRCDDCASGYFGNPSEVGGSCQPCQCHNNIDTTDPEACDKETGRCLKCLYHTEGEHCQFCRFGYYGDALQQDCRKCVCNYLGTVQEHCNGSDCQCDKATGQCLCLPNVIGQNCDRCAPNTWQLASGTGCDPCNCNAAHSFGPSCNEFTGQCQCMPGFGGRTCSECQELFWGDPDVECRACDCDPRGIETPQCDQSTGQCVCVEGVEGPRCDKCTRGYSGVFPDCTPCHQCFALWDVIIAELTNRTHRFLEKAKALKISGVIGPYRETVDSVERKVSEIKDILAQSPAAEPLKNIGNLFEEAEKLIKDVTEMMAQVEVKLSDTTSQSNSTAKELDSLQTEAESLDNTVKELAEQLEFIKNSDIRGALDSITKYFQMSLEAEERVNASTTEPNSTVEQSALMRDRVEDVMMERESQFKEKQEEQARLLDELAGKLQSLDLSAAAEMTCGTPPGASCSETECGGPNCRTDEGERKCGGPGCGGLVTVAHNAWQKAMDLDQDVLSALAEVEQLSKMVSEAKLRADEAKQSAEDILLKTNATKEKMDKSNEELRNLIKQIRNFLTQDSADLDSIEAVANEVLKMEMPSTPQQLQNLTEDIRERVESLSQVEVILQHSAADIARAEMLLEEAKRASKSATDVKVTADMVKEALEEAEKAQVAAEKAIKQADEDIQGTQNLLTSIESETAASEETLFNASQRISELERNVEELKRKAAQNSGEAEYIEKVVYTVKQSAEDVKKTLDGELDEKYKKVENLIAKKTEESADARRKAEMLQNEAKTLLAQANSKLQLLKDLERKYEDNQRYLEDKAQELARLEGEVRSLLKDISQKVAVYSTCL

SEQ ID NO: 138 - protein, 505 aa, Homo sapiens
  source 1..505: note = sp|Q13424|SNTA1_HUMAN Alpha-1-syntrophin OS=Homo sapiens OX=9606 GN=SNTA1 PE=1 SV=1
MASGRRAPRTGLLELRAGAGSGAGGERWQRVLLSLAEDVLTVSPADGDPGPEPGAPREQEPAQLNGAAEPGAGPPQLPEALLLQRRRVTVRKADAGGLGISIKGGRENKMPILISKIFKGLAADQTEALFVGDAILSVNGEDLSSATHDEAVQVLKKTGKEVVLEVKYMKDVSPYFKNSTGGTSVGWDSPPASPLQRQPSSPGPTPRNFSEAKHMSLKMAYVSKRCTPNDPEPRYLEICSADGQDTLFLRAKDEASARSWATAIQAQVNTLTPRVKDELQALLAATSTAGSQDIKQIGWLTEQLPSGGTAPTLALLTEKELLLYLSLPETREALSRPARTAPLIATRLVHSGPSKGSVPYDAELSFALRTGTRHGVDTHLFSVESPQELAAWTRQLVDGCHRAAEGVQEVSTACTWNGRPCSLSVHIDKGFTLWAAEPGAARAVLLRQPFEKLQMSSDDGASLLFLDFGGAEGEIQLDLHSCPKTIVFIIHSFLSAKVTRLGLLA

SEQ ID NO: 139 - protein, 1496 aa, Homo sapiens
  source 1..1496: note = sp|O15056|SYNJ2_HUMAN Synaptojanin-2 OS=Homo sapiens; OX = 9606 GN=SYNJ2 PE=1 SV=3
MALSKGLRLLGRLGAEGDCSVLLEARGRDDCLLFEAGTVATLAPEEKEVIKGQYGKLTDAYGCLGELRLKSGGTSLSFLVLVTGCTSVGRIPDAEIYKITATDFYPLQEEAKEEERLIALKKILSSGVFYFSWPNDGSRFDLTVRTQKQGDDSSEWGNSFFWNQLLHVPLRQHQVSCCDWLLKIICGVVTIRTVYASHKQAKACLVSRVSCERTGTRFHTRGVNDDGHVSNFVETEQMIYMDDGVSSFVQIRGSVPLFWEQPGLQVGSHHLRLHRGLEANAPAFDRHMVLLKEQYGQQVVVNLLGSRGGEEVLNRAFKKLLWASCHAGDTPMINFDFHQFAKGGKLEKLETLLRPQLKLHWEDFDVFTKGENVSPRFQKGTLRMNCLDCLDRTNTVQSFIALEVLHLQLKTLGLSSKPIVDRFVESFKAMWSLNGHSLSKVFTGSRALEGKAKVGKLKDGARSMSRTIQSNFFDGVKQEAIKLLLVGDVYGEEVADKGGMLLDSTALLVTPRILKAMTERQSEFTNFKRIRIAMGTWNVNGGKQFRSNVLRTAELTDWLLDSPQLSGATDSQDDSSPADIFAVGFEEMVELSAGNIVNASTTNKKMWGEQLQKAISRSHRYILLTSAQLVGVCLYIFVRPYHVPFIRDVAIDTVKTGMGGKAGNKGAVGIRFQFHSTSFCFICSHLTAGQSQVKERNEDYKEITQKLCFPMGRNVFSHDYVFWCGDFNYRIDLTYEEVFYFVKRQDWKKLLEFDQLQLQKSSGKIFKDFHEGAINFGPTYKYDVGSAAYDTSDKCRTPAWTDRVLWWRKKHPFDKTAGELNLLDSDLDVDTKVRHTWSPGALQYYGRAELQASDHRPVLAIVEVEVQEVDVGARERVFQEVSSFQGPLDATVVVNLQSPTLEEKNEFPEDLRTELMQTLGSYGTIVLVRINQGQMLVTFADSHSALSVLDVDGMKVKGRAVKIRPKTKDWLKGLREEIIRKRDSMAPVSPTANSCLLEENFDFTSLDYESEGDILEDDEDYLVDEFNQPGVSDSELGGDDLSDVPGPTALAPPSKSPALTKKKQHPTYKDDADLVELKRELEAVGEFRHRSPSRSLSVPNRPRPPQPPQRPPPPTGLMVKKSASDASISSGTHGQYSILQTARLLPGAPQQPPKARTGISKPYNVKQIKTTNAQEAEAAIRCLLEARGGASEEALSAVAPRDLEASSEPEPTPGAAKPETPQAPPLLPRRPPPRVPAIKKPTLRRTGKPLSPEEQFEQQTVHFTIGPPETSVEAPPVVTAPRVPPVPKPRTFQPGKAAERPSHRKPASDEAPPGAGASVPPPLEAPPLVPKVPPRRKKSAPAAFHLQVLQSNSQLLQGLTYNSSDSPSGHPPAAGTVFPQGDFLSTSSATSPDSDGTKAMKPEAAPLLGDYQDPFWNLLHHPKLLNNTWLSKSSDPLDSGTRSPKRDPIDPVSAGASAAKAELPPDHEHKTLGHWVTISDQEKRTALQVFDPLAKT

SEQ ID NO: 140 - protein, 299 aa, Homo sapiens
  source 1..299: note = sp|O95685|PPR3D_HUMAN Protein phosphatase 1 regulatory subunit 3D OS=Homo sapiens OX=9606 GN=PPP1R3D; PE = 1 SV=1
MSRGPSSAVLPSALGSRKLGPRSLSCLSDLDGGVALEPRACRPPGSPGRAPPPTPAPSGCDPRLRPIILRRARSLPSSPERRQKAAGAPGAACRPGCSQKLRVRFADALGLELAQVKVFNAGDDPSVPLHVLSRLAINSDLCCSSQDLEFTLHCLVPDFPPPVEAADFGERLQRQLVCLERVTCSDLGISGTVRVCNVAFEKQVAVRYTFSGWRSTHEAVARWRGPAGPEGTEDVFTFGFPVPPFLLELGSRVHFAVRYQVAGAEYWDNNDHRDYSLTCRNHALHMPRGECEESWIHFI

SEQ ID NO: 141 - protein, 426 aa, Homo sapiens
  source 1..426: note = sp|Q6ZS27|ZN662_HUMAN Zinc finger protein 662; OS = Homo sapiens OX=9606 GN=ZNF662 PE=1 SV=1
MLENYGAVASLAAFPFPKPALISQLERGETPWCSVPRGALDGEAPRGISSGYPFLKPAGISHPEQVEEPLNLKLQGEGPSLICPEGVLKRKKEDFILKEEIIEEAQDLMVLSSGPQWCGSQELWFGKTCEEKSRLGRWPGYLNGGRMESSTNDIIEVIVKDEMISVEESSGNTDVNNLLGIHHKILNEQIFYICEECGKCFDQNEDFDQHQKTHNGEKVYGCKECGKAFSFRSHCIAHQRIHSGVKPYECQECAKAFVWKSNLIRHQRIHTGEKPFECKECGKGFSQNTSLTQHQRIHTGEKPYTCKECGKSFTRNPALLRHQRMHTGEKPYECKDCGKGFMWNSDLSQHQRVHTGDKPHECTDCGKSFFCKAHLIRHQRIHTGERPYKCNDCGKAFSQNSVLIKHQRRHARDKPYNCQISHLLEH

SEQ ID NO: 142 - protein, 928 aa, Homo sapiens
  source 1..928: note = sp|P06400|RB_HUMAN Retinoblastoma-associated protein; OS = Homo sapiens OX=9606 GN=RB1 PE=1 SV=2
MPPKTPRKTAATAAAAAAEPPAPPPPPPPEEDPEQDSGPEDLPLVRLEFEETEEPDFTALCQKLKIPDHVRERAWLTWEKVSSVDGVLGGYIQKKKELWGICIFIAAVDLDEMSFTFTELQKNIEISVHKFFNLLKEIDTSTKVDNAMSRLLKKYDVLFALFSKLERTCELIYLTQPSSSISTEINSALVLKVSWITFLLAKGEVLQMEDDLVISFQLMLCVLDYFIKLSPPMLLKEPYKTAVIPINGSPRTPRRGQNRSARIAKQLENDTRIIEVLCKEHECNIDEVKNVYFKNFIPFMNSLGLVTSNGLPEVENLSKRYEEIYLKNKDLDARLFLDHDKTLQTDSIDSFETQRTPRKSNLDEEVNVIPPHTPVRTVMNTIQQLMMILNSASDQPSENLISYFNNCTVNPKESILKRVKDIGYIFKEKFAKAVGQGCVEIGSQRYKLGVRLYYRVMESMLKSEEERLSIQNFSKLLNDNIFHMSLLACALEVVMATYSRSTSQNLDSGTDLSFPWILNVLNLKAFDFYKVIESFIKAEGNLTREMIKHLERCEHRIMESLAWLSDSPLFDLIKQSKDREGPTDHLESACPLNLPLQNNHTAADMYLSPVRSPKKKGSTTRVNSTANAETQATSAFQTQKPLKSTSLSLFYKKVYRLAYLRLNTLCERLLSEHPELEHIIWTLFQHTLQNEYELMRDRHLDQIMMCSMYGICKVKNIDLKFKIIVTAYKDLPHAVQETFKRVLIKEEEYDSIIVFYNSVFMQRLKTNILQYASTRPPTLSPIPHIPRSPYKFPSSPLRIPGGNIYISPLKSPYKISEGLPTPTKMTPRSRILVSIGESFGTSEKFQKINQMVCNSDRVLKRSAEGSNPPKPLKKLRFDIEGSDEADGSKHLPGESKFQQKLAEMTSTRTRMQKQKMNDSMDTSNKEEK

SEQ ID NO: 143 - protein, 380 aa, Homo sapiens
  source 1..380: note = sp|Q9UNW8|GP132_HUMAN Probable G-protein coupled receptor 132 OS=Homo sapiens OX=9606 GN=GPR132 PE=1 SV=1
MCPMLLKNGYNGNATPVTTTAPWASLGLSAKTCNNVSFEESRIVLVVVYSAVCTLGVPANCLTAWLALLQVLQGNVLAVYLLCLALCELLYTGTLPLWVIYIRNQHRWTLGLLACKVTAYIFFCNIYVSILFLCCISCDRFVAVVYALESRGRRRRRTAILISACIFILVGIVHYPVFQTEDKETCFDMLQMDSRIAGYYYARFTVGFAIPLSIIAFTNHRIFRSIKQSMGLSAAQKAKVKHSAIAVVVIFLVCFAPYHLVLLVKAAAFSYYRGDRNAMCGLEERLYTASVVFLCLSTVNGVADPIIYVLATDHSRQEVSRIHKGWKEWSMKTDVTRLTHSRDTEELQSPVALADHYTFSRPVHPPGSPCPAKRLIEESC

SEQ ID NO: 144 - protein, 681 aa, Homo sapiens
  source 1..681: note = sp|Q9NQU5|PAK6_HUMAN Serine/threonine-protein kinase PAK 6 OS=Homo sapiens OX=9606 GN=PAK6 PE=1 SV=1
MFRKKKKKRPEISAPQNFQHRVHTSFDPKEGKFVGLPPQWQNILDTLRRPKPVVDPSRITRVQLQPMKTVVRGSAMPVDGYISGLLNDIQKLSVISSNTLRGRSPTSRRRAQSLGLLGDEHWATDPDMYLQSPQSERTDPHGLYLSCNGGTPAGHKQMPWPEPQSPRVLPNGLAAKAQSLGPAEFQGASQRCLQLGACLQSSPPGASPPTGTNRHGMKAAKHGSEEARPQSCLVGSATGRPGGEGSPSPKTRESSLKRRLFRSMFLSTAATAPPSSSKPGPPPQSKPNSSFRPPQKDNPPSLVAKAQSLPSDQPVGTFSPLTTSDTSSPQKSLRTAPATGQLPGRSSPAGSPRTWHAQISTSNLYLPQDPTVAKGALAGEDTGVVTHEQFKAALRMVVDQGDPRLLLDSYVKIGEGSTGIVCLAREKHSGRQVAVKMMDLRKQQRRELLFNEVVIMRDYQHFNVVEMYKSYLVGEELWVLMEFLQGGALTDIVSQVRLNEEQIATVCEAVLQALAYLHAQGVIHRDIKSDSILLTLDGRVKLSDFGFCAQISKDVPKRKSLVGTPYWMAPEVISRSLYATEVDIWSLGIMVIEMVDGEPPYFSDSPVQAMKRLRDSPPPKLKNSHKVSPVLRDFLERMLVRDPQERATAQELLDHPFLLQTGLPECLVPLIQLYRKQTSTC

SEQ ID NO: 145 - protein, 798 aa, Homo sapiens
  source 1..798: note = sp|Q6AI14|SL9A4_HUMAN Sodium/hydrogen exchanger 4; OS = Homo sapiens OX=9606 GN=SLC9A4 PE=2 SV=2
MALQMFVTYSPWNCLLLLVALECSEASSDLNESANSTAQYASNAWFAAASSEPEEGISVFELDYDYVQIPYEVTLWILLASLAKIGFHLYHRLPGLMPESCLLILVGALVGGIIFGTDHKSPPVMDSSIYFLYLLPPIVLEGGYFMPTRPFFENIGSILWWAVLGALINALGIGLSLYLICQVKAFGLGDVNLLQNLLFGSLISAVDPVAVLAVFEEARVNEQLYMMIFGEALLNDGITVVLYNMLIAFTKMHKFEDIETVDILAGCARFIVVGLGGVLFGIVFGFISAFITRFTQNISAIEPLIVFMFSYLSYLAAETLYLSGILAITACAVTMKKYVEENVSQTSYTTIKYFMKMLSSVSETLIFIFMGVSTVGKNHEWNWAFICFTLAFCQIWRAISVFALFYISNQFRTFPFSIKDQCIIFYSGVRGAGSFSLAFLLPLSLFPRKKMFVTATLVVIYFTVFIQGITVGPLVRYLDVKKTNKKESINEELHIRLMDHLKAGIEDVCGHWSHYQVRDKFKKFDHRYLRKILIRKNLPKSSIVSLYKKLEMKQAIEMVETGILSSTAFSIPHQAQRIQGIKRLSPEDVESIRDILTSNMYQVRQRTLSYNKYNLKPQTSEKQAKEILIRRQNTLRESMRKGHSLPWGKPAGTKNIRYLSYPYGNPQSAGRDTRAAGFSDDDSSDPGSPSITFSACSRIGSLQKQEAQEIIPMKSLHRGRKAFSFGYQRNTSQEEYLGGVRRVALRPKPLFHAVDEEGESGGESEGKASLVEVRSRWTADHGHGRDHHRSHSPLLQKK

SEQ ID NO: 146 - protein, 356 aa, Homo sapiens
  source 1..356: note = sp|Q7LGA3|HS2ST_HUMAN Heparan sulfate 2-O-sulfotransferase 1 OS=Homo sapiens OX=9606 GN=HS2ST1; PE = 1 SV=1
MGLLRIMMPPKLQLLAVVAFAVAMLFLENQIQKLEESRSKLERAIARHEVREIEQRHTMDGPRQDATLDEEEDMVIIYNRVPKTASTSFTNIAYDLCAKNKYHVLHINTTKNNPVMSLQDQVRFVKNITSWKEMKPGFYHGHVSYLDFAKFGVKKKPIYINVIRDPIERLVSYYYFLRFGDDYRPGLRRRKQGDKKTFDECVAEGGSDCAPEKLWLQIPFFCGHSSECWNVGSRWAMDQAKYNLINEYFLVGVTEELEDFIMLLEAALPRFFRGATELYRTGKKSHLRKTTEKKLPTKQTIAKLQQSDIWKMENEFYEFALEQFQFIRAHAVREKDGDLYILAQNFFYEKIYPKSN

SEQ ID NO: 147 - protein, 557 aa, Homo sapiens
  source 1..557: note = sp|Q96SF2|TCPQM_HUMAN T-complex protein 1 subunit theta-like 2 OS=Homo sapiens OX=9606 GN=CCT8L2 PE=2 SV=2
MDSTVPSALELPQRLALNPRESPRSPEEEEPHLLSSLAAVQTLASVIRPCYGPHGRQKFLVTMKGETVCTGCATAILRALELEHPAAWLLREAGQTQAENSGDGTAFVVLLTEALLEQAEQLLKAGLPRPQLREAYATATAEVLATLPSLAIQSLGPLEDPSWALHSVMNTHTLSPMDHLTKLVAHACWAIKELDGSFKPERVGVCALPGGTLEDSCLLPGLAISGKLCGQMATVLSGARVALFACPFGPAHPNAPATARLSSPADLAQFSKGSDQLLEKQVGQLAAAGINVAVVLGEVDEETLTLADKYGIVVIQARSWMEIIYLSEVLDTPLLPRLLPPQRPGKCQRVYRQELGDGLAVVFEWECTGTPALTVVLRGATTQGLRSAEQAVYHGIDAYFQLCQDPRLIPGAGATEMALAKMLSDKGSRLEGPSGPAFLAFAWALKYLPKTLAENAGLAVSDVMAEMSGVHQGGNLLMGVGTEGIINVAQEGVWDTLIVKAQGFRAVAEVVLQLVTVDEIVVAKKSPTHQEIWNPDSKKTKKHPPPVETKKILGLNN

SEQ ID NO: 148 - protein, 496 aa, Homo sapiens
  source 1..496: note = sp|Q9BTV5|FSD1_HUMAN Fibronectin type III and SPRY domain-containing protein 1 OS=Homo sapiens OX=9606; GN = FSD1 PE=1 SV=1
MEEQREALRKIIKTLAVKNEEIQSFIYSLKQMLLNVEANSAKVQEDLEAEFQSLFSLLEELKEGMLMKIKQDRASRTYELQNQLAACTRALESSEELLETANQTLQAMDSEDFPQAAKQIKDGVTMAPAFRLSLKAKVSDNMSHLMVDFAQERQMLQALKFLPVPSAPVIDLAESLVADNCVTLVWRMPDEDSKIDHYVLEYRRTNFEGPPRLKEDQPWMVIEGIRQTEYTLTGLKFDMKYMNFRVKACNKAVAGEFSEPVTLETPAFMFRLDASTSHQNLRVDDLSVEWDAMGGKVQDIKAREKDGKGRTASPINSPARGTPSPKRMPSGRGGRDRFTAESYTVLGDTLIDGGEHYWEVRYEPDSKAFGVGVAYRSLGRFEQLGKTAASWCLHVNNWLQVSFTAKHANKVKVLDAPVPDCLGVHCDFHQGLLSFYNARTKQVLHTFKTRFTQPLLPAFTVWCGSFQVTTGLQVPSAVRCLQKRGSATSSSNTSLT

SEQ ID NO: 149 - protein, 484 aa, Homo sapiens
  source 1..484: note = sp|P43268|ETV4_HUMAN ETS translocation variant 4; OS = Homo sapiens OX=9606 GN=ETV4 PE=1 SV=3
MERRMKAGYLDQQVPYTFSSKSPGNGSLREALIGPLGKLMDPGSLPPLDSEDLFQDLSHFQETWLAEAQVPDSDEQFVPDFHSENLAFHSPTTRIKKEPQSPRTDPALSCSRKPPLPYHHGEQCLYSSAYDPPRQIAIKSPAPGALGQSPLQPFPRAEQRNFLRSSGTSQPHPGHGYLGEHSSVFQQPLDICHSFTSQGGGREPLPAPYQHQLSEPCPPYPQQSFKQEYHDPLYEQAGQPAVDQGGVNGHRYPGAGVVIKQEQTDFAYDSDVTGCASMYLHTEGFSGPSPGDGAMGYGYEKPLRPFPDDVCVVPEKFEGDIKQEGVGAFREGPPYQRRGALQLWQFLVALLDDPTNAHFIAWTGRGMEFKLIEPEEVARLWGIQKNRPAMNYDKLSRSLRYYYEKGIMQKVAGERYVYKFVCEPEALFSLAFPDNQRPALKAEFDRPVSEEDTVPLSHLDESPAYLPELAGPAQPFGPKGGYSY

SEQ ID NO: 150 - protein, 888 aa, Homo sapiens
  source 1..888: note = sp|Q9H3T3|SEM6B_HUMAN Semaphorin-6B OS=Homo sapiens; OX = 9606 GN=SEMA6B PE=1 SV=4
MQTPRASPPRPALLLLLLLLGGAHGLFPEEPPPLSVAPRDYLNHYPVFVGSGPGRLTPAEGADDLNIQRVLRVNRTLFIGDRDNLYRVELEPPTSTELRYQRKLTWRSNPSDINVCRMKGKQEGECRNFVKVLLLRDESTLFVCGSNAFNPVCANYSIDTLQPVGDNISGMARCPYDPKHANVALFSDGMLFTATVTDFLAIDAVIYRSLGDRPTLRTVKHDSKWFKEPYFVHAVEWGSHVYFFFREIAMEFNYLEKVVVSRVARVCKNDVGGSPRVLEKQWTSFLKARLNCSVPGDSHFYFNVLQAVTGVVSLGGRPVVLAVFSTPSNSIPGSAVCAFDLTQVAAVFEGRFREQKSPESIWTPVPEDQVPRPRPGCCAAPGMQYNASSALPDDILNFVKTHPLMDEAVPSLGHAPWILRTLMRHQLTRVAVDVGAGPWGNQTVVFLGSEAGTVLKFLVRPNASTSGTSGLSVFLEEFETYRPDRCGRPGGGETGQRLLSLELDAASGGLLAAFPRCVVRVPVARCQQYSGCMKNCIGSQDPYCGWAPDGSCIFLSPGTRAAFEQDVSGASTSGLGDCTGLLRASLSEDRAGLVSVNLLVTSSVAAFVVGAVVSGFSVGWFVGLRERRELARRKDKEAILAHGAGEAVLSVSRLGERRAQGPGGRGGGGGGGAGVPPEALLAPLMQNGWAKATLLQGGPHDLDSGLLPTPEQTPLPQKRLPTPHPHPHALGPRAWDHGHPLLPASASSSLLLLAPARAPEQPPAPGEPTPDGRLYAARPGRASHGDFPLTPHASPDRRRVVSAPTGPLDPASAADGLPRPWSPPPTGSLRRPLGPHAPPAATLRRTHTFNSGEARPGDRHRGCHARPGTDLAHLLPYGGADRTAPPVP

SEQ ID NO: 151 - protein, 458 aa, Homo sapiens
  source 1..458: note = sp|P17023|ZNF19_HUMAN Zinc finger protein 19 OS=Homo sapiens OX=9606 GN=ZNF19 PE=1 SV=4
MAAMPLKAQYQEMVTFEDVAVHFTKTEWTGLSPAQRALYRSVMLENFGNLTALGYPVPKPALISLLERGDMAWGLEAQDDPPAERTKNVCKDVETNIDSESTLIQGISEERDGMMSHGQLKSVPQRTDFPETRNVEKHQDIPTVKNIQGKVPRIPCARKPFICEECGKSFSYFSYYARHQRIHTGEKPFECSECGKAFNGNSSLIRHQRIHTGERPYQCEECGRAFNDNANLIRHQRIHSGDRPYYCTECGNSFTSSSEFVIHQRIHTGEKPYECNECGKAFVGNSPLLRHQKIHTGEKPYECNECGKSFGRTSHLSQHQRIHTGEKPYSCKVCGQAFNFHTKLTRHQRIHSEEKPFDCVDCGKAFSAQEQLKRHLRIHTQESSYVCDECGKALTSKRNLHQHQRIHTGEKPYECSKYEKAFGTSSQLGHLEHVYSGEKPVLDICRFGLPEFFTPFYW

SEQ ID NO: 152 - protein, 422 aa, Homo sapiens
  source 1..422: note = sp|Q6J9G0|STYK1_HUMAN Tyrosine-protein kinase STYK1; OS = Homo sapiens OX=9606 GN=STYK1 PE=1 SV=4
MGMTRMLLECSLSDKLCVIQEKQYEVIIVPTLLVTIFLILLGVILWLFIREQRTQQQRSGPQGIAPVPPPRDLSWEAGHGGNVALPLKETSVENFLGATTPALAKLQVPREQLSEVLEQICSGSCGPIFRANMNTGDPSKPKSVILKALKEPAGLHEVQDFLGRIQFHQYLGKHKNLVQLEGCCTEKLPLYMVLEDVAQGDLLSFLWTCRRDVMTMDGLLYDLTEKQVYHIGKQVLLALEFLQEKHLFHGDVAARNILMQSDLTAKLCGLGLAYEVYTRGAISSTQTIPLKWLAPERLLLRPASIRADVWSFGILLYEMVTLGAPPYPEVPPTSILEHLQRRKIMKRPSSCTHTMYSIMKSCWRWREADRPSPRELRLRLEAAIKTADDEAVLQVPELVVPELYAAVAGIRVESLFYNYSML

SEQ ID NO: 153 - protein, 631 aa, Homo sapiens
  source 1..631: note = sp|Q9H361|PABP3_HUMAN Polyadenylate-binding protein 3 OS=Homo sapiens OX=9606 GN=PABPC3 PE=1 SV=2
MNPSTPSYPTASLYVGDLHPDVTEAMLYEKFSPAGPILSIRICRDLITSGSSNYAYVNFQHTKDAEHALDTMNFDVIKGKPVRIMWSQRDPSLRKSGVGNIFVKNLDKSINNKALYDTVSAFGNILSCNVVCDENGSKGYGFVHFETHEAAERAIKKMNGMLLNGRKVFVGQFKSRKEREAELGARAKEFPNVYIKNFGEDMDDERLKDLFGKFGPALSVKVMTDESGKSKGFGFVSFERHEDAQKAVDEMNGKELNGKQIYVGRAQKKVERQTELKRTFEQMKQDRITRYQVVNLYVKNLDDGIDDERLRKAFSPFGTITSAKVMMEGGRSKGFGFVCFSSPEEATKAVTEMNGRIVATKPLYVALAQRKEERQAYLTNEYMQRMASVRAVPNQRAPPSGYFMTAVPQTQNHAAYYPPSQIARLRPSPRWTAQGARPHPFQNKPSAIRPGAPRVPFSTMRPASSQVPRVMSTQRVANTSTQTVGPRPAAAAAAAATPAVRTVPRYKYAAGVRNPQQHRNAQPQVTMQQLAVHVQGQETLTASRLASAPPQKQKQMLGERLFPLIQAMHPTLAGKITGMLLEIDNSELLYMLESPESLRSKVDEAVAVLQAHQAKEATQKAVNSATGVPTV

SEQ ID NO: 154 - protein, 539 aa, Homo sapiens
  source 1..539: note = sp|Q8N9K5|ZN565_HUMAN Zinc finger protein 565; OS = Homo sapiens OX=9606 GN=ZNF565 PE=2 SV=2
MRRGPWERWSLASHRLDAGLCTCPREESREIRAGQIVLKAMAQGLVTFRDVAIEFSLEEWKCLEPAQRDLYREVTLENFGHLASLGLSISKPDVVSLLEQGKEPWMIANDVTGPWCPDLESRCEKFLQKDIFEIGAFNWEIMESLKCSDLEGSDFRADWECEGQFERQVNEECYFKQVNVTYGHMPVFQHHTSHTVRQSRETGEKLMECHECGKAFSRGSHLIQHQKIHTGEKPFGCKECGKAFSRASHLVQHQRIHTGEKPYDCKDCGKAFGRTSELILHQRLHTGVKPYECKECGKTFRQHSQLILHQRTHTGEKPYVCKDCGKAFIRGSQLTVHRRIHTGARPYECKECGKAFRQHSQLTVHQRIHTGEKPYECKECGKGFIHSSEVTRHQRIHSGEKPYECKECGKAFRQHAQLTRHQRVHTGDRPYECKDCGKAFSRSSYLIQHQRIHTGDKPYECKECGKAFIRVSQLTHHQRIHTCEKPYECRECGMAFIRSSQLTEHQRIHPGIKPYECRECGQAFILGSQLIEHYRIHTG

SEQ ID NO: 155 - protein, 1159 aa, Homo sapiens
  source 1..1159: note = sp|O14917|PCD17_HUMAN Protocadherin-17 OS=Homo sapiens OX=9606 GN=PCDH17 PE=1 SV=2
MYLSICCCFLLWAPALTLKNLNYSVPEEQGAGTVIGNIGRDARLQPGLPPAERGGGGRSKSGSYRVLENSAPHLLDVDADSGLLYTKQRIDRESLCRHNAKCQLSLEVFANDKEICMIKVEIQDINDNAPSFSSDQIEMDISENAAPGTRFPLTSAHDPDAGENGLRTYLLTRDDHGLFGLDVKSRGDGTKFPELVIQKALDREQQNHHTLVLTALDGGEPPRSATVQINVKVIDSNDNSPVFEAPSYLVELPENAPLGTVVIDLNATDADEGPNGEVLYSFSSYVPDRVRELFSIDPKTGLIRVKGNLDYEENGMLEIDVQARDLGPNPIPAHCKVTVKLIDRNDNAPSIGFVSVRQGALSEAAPPGTVIALVRVTDRDSGKNGQLQCRVLGGGGTGGGGGLGGPGGSVPFKLEENYDNFYTVVTDRPLDRETQDEYNVTIVARDGGSPPLNSTKSFAIKILDENDNPPRFTKGLYVLQVHENNIPGEYLGSVLAQDPDLGQNGTVSYSILPSHIGDVSIYTYVSVNPTNGAIYALRSFNFEQTKAFEFKVLAKDSGAPAHLESNATVRVTVLDVNDNAPVIVLPTLQNDTAELQVPRNAGLGYLVSTVRALDSDFGESGRLTYEIVDGNDDHLFEIDPSSGEIRTLHPFWEDVTPVVELVVKVTDHGKPTLSAVAKLIIRSVSGSLPEGVPRVNGEQHHWDMSLPLIVTLSTISIILLAAMITIAVKCKRENKEIRTYNCRIAEYSHPQLGGGKGKKKKINKNDIMLVQSEVEERNAMNVMNVVSSPSLATSPMYFDYQTRLPLSSPRSEVMYLKPASNNLTVPQGHAGCHTSFTGQGTNASETPATRMSIIQTDNFPAEPNYMGSRQQFVQSSSTFKDPERASLRDSGHGDSDQADSDQDTNKGSCCDMSVREALKMKTTSTKSQPLEQEPEECVNCTDECRVLGHSDRCWMPQFPAANQAENADYRTNLFVPTVEANVETETYETVNPTGKKTFCTFGKDKREHTILIANVKPYLKAKRALSPLLQEVPSASSSPTKACIEPCTSTKGSLDGCEAKPGALAEASSQYLPTDSQYLSPSKQPRDPPFMASDQMARVFADVHSRASRDSSEMGAVLEQLDHPNRDLGRESVDAEEVVREIDKLLQDCRGNDPVAVRK

SEQ ID NO: 156 - protein, 355 aa, Homo sapiens
  source 1..355: note = sp|P51685|CCR8_HUMAN C-C chemokine receptor type 8; OS = Homo sapiens OX=9606 GN=CCR8 PE=1 SV=1
MDYTLDLSVTTVTDYYYPDIFSSPCDAELIQTNGKLLLAVFYCLLFVFSLLGNSLVILVLVVCKKLRSITDVYLLNLALSDLLFVFSFPFQTYYLLDQWVFGTVMCKVVSGFYYIGFYSSMFFITLMSVDRYLAVVHAVYALKVRTIRMGTTLCLAVWLTAIMATIPLLVFYQVASEDGVLQCYSFYNQQTLKWKIFTNFKMNILGLLIPFTIFMFCYIKILHQLKRCQNHNKTKAIRLVLIVVIASLLFWVPFNVVLFLTSLHSMHILDGCSISQQLTYATHVTEIISFTHCCVNPVIYAFVGEKFKKHLSEIFQKSCSQIFNYLGRQMPRESCEKSSSCQQHSSRSSSVDYIL

SEQ ID NO: 157 - protein, 1029 aa, Homo sapiens
  source 1..1029: note = sp|Q9P2E2|KIF17_HUMAN Kinesin-like protein KIF17; OS = Homo sapiens OX=9606 GN=KIF17 PE=2 SV=3
MASEAVKVVVRCRPMNQRERELRCQPVVTVDCARAQCCIQNPGAADEPPKQFTFDGAYHVDHVTEQIYNEIAYPLVEGVTEGYNGTIFAYGQTGSGKSFTMQGLPDPPSQRGIIPRAFEHVFESVQCAENTKFLVRASYLEIYNEDVRDLLGADTKQKLELKEHPEKGVYVKGLSMHTVHSVAQCEHIMETGWKNRSVGYTLMNKDSSRSHSIFTISIEMSAVDERGKDHLRAGKLNLVDLAGSERQSKTGATGERLKEATKINLSLSALGNVISALVDGRCKHVPYRDSKLTRLLQDSLGGNTKTLMVACLSPADNNYDETLSTLRYANRAKNIRNKPRINEDPKDALLREYQEEIKKLKAILTQQMSPSSLSALLSRQVPPDPVQVEEKLLPQPVIQHDVEAEKQLIREEYEERLARLKADYKAEQESRARLEEDITAMRNSYDVRLSTLEENLRKETEAVLQVGVLYKAEVMSRAEFASSAEYPPAFQYETVVKPKVFSTTDTLPSDDVSKTQVSSRFAELPKVEPSKSEISLGSSESSSLEETSVSEAFPGPEEPSNVEVSMPTEESRSRYFLDECLGQEAAGHLLGEQNYLPQEEPQEVPLQGLLGLQDPFAEVEAKLARLSSTVARTDAPQADVPKVPVQVPAPTDLLEPSDARPEAEAADDFPPRPEVDLASEVALEVVRTAEPGVWLEAQAPVALVAQPEPLPATAGVKRESVGMEVAVLTDDPLPVVDQQQVLARLQLLEQQVVGGEQAKNKDLKEKHKRRKRYADERRKQLVAALQNSDEDSGDWVLLNVYDSIQEEVRAKSKLLEKMQRKLRAAEVEIKDLQSEFQLEKIDYLATIRRQERDSMLLQQLLEQVQPLIRRDCNYSNLEKILRESCWDEDNGFWKIPHPVITKTSLPVAVSTGPQNKPARKTSAADNGEPNMEDDRYRLMLSRSNSENIASNYFRSKRASQILSTDARKSLTHHNSPPGLSCPLSNNSAIPPTQAPEMPQPRPFRLESLDIPFTKAKRKKSKSNFGSEPL

SEQ ID NO: 158 - protein, 241 aa, Homo sapiens
  source 1..241: note = sp|P20618|PSB1_HUMAN Proteasome subunit beta type-1; OS = Homo sapiens OX=9606 GN=PSMB1 PE=1 SV=2
MLSSTAMYSAPGRDLGMEPHRAAGPLQLRFSPYVFNGGTILAIAGEDFAIVASDTRLSEGFSIHTRDSPKCYKLTDKTVIGCSGFHGDCLTLTKIIEARLKMYKHSNNKAMTTGAIAAMLSTILYSRRFFPYYVYNIIGGLDEEGKGAVYSFDPVGSYQRDSFKAGGSASAMLQPLLDNQVGFKNMQNVEHVPLSLDRAMRLVKDVFISAAERDVYTGDALRICIVTKEGIREETVSLRKD

SEQ ID NO: 159 - protein, 429 aa, Homo sapiens
  source 1..429: note = sp|O43826|G6PT1_HUMAN Glucose-6-phosphate exchanger SLC37A4 OS=Homo sapiens OX=9606 GN=SLC37A4 PE=1 SV=1
MAAQGYGYYRTVIFSAMFGGYSLYYFNRKTFSFVMPSLVEEIPLDKDDLGFITSSQSAAYAISKFVSGVLSDQMSARWLFSSGLLLVGLVNIFFAWSSTVPVFAALWFLNGLAQGLGWPPCGKVLRKWFEPSQFGTWWAILSTSMNLAGGLGPILATILAQSYSWRSTLALSGALCVVVSFLCLLLIHNEPADVGLRNLDPMPSEGKKGSLKEESTLQELLLSPYLWVLSTGYLVVFGVKTCCTDWGQFFLIQEKGQSALVGSSYMSALEVGGLVGSIAAGYLSDRAMAKAGLSNYGNPRHGLLLFMMAGMTVSMYLFRVTVTSDSPKLWILVLGAVFGFSSYGPIALFGVIANESAPPNLCGTSHAIVGLMANVGGFLAGLPFSTIAKHYSWSTAFWVAEVICAASTAAFFLLRNIRTKMGRVSKKAE

SEQ ID NO: 160 - protein, 112 aa, Homo sapiens
  source 1..112: note = sp|Q9Y4X3|CCL27_HUMAN C-C motif chemokine 27 OS=Homo sapiens OX=9606 GN=CCL27 PE=1 SV=1
MKGPPTFCSLLLLSLLLSPDPTAAFLLPPSTACCTQLYRKPLSDKLLRKVIQVELQEADGDCHLQAFVLHLAQRSICIHPQNPSLSQWFEHQERKLHGTLPKLNFGMLRKMG

SEQ ID NO: 161 - protein, 482 aa, Homo sapiens
  source 1..482: note = sp|Q16581|C3AR_HUMAN C3a anaphylatoxin chemotactic receptor OS=Homo sapiens OX=9606 GN=C3AR1 PE=1 SV=2
MASFSAETNSTDLLSQPWNEPPVILSMVILSLTFLLGLPGNGLVLWVAGLKMQRTVNTIWFLHLTLADLLCCLSLPFSLAHLALQGQWPYGRFLCKLIPSIIVLNMFASVFLLTAISLDRCLVVFKPIWCQNHRNVGMACSICGCIWVVAFVMCIPVFVYREIFTTDNHNRCGYKFGLSSSLDYPDFYGDPLENRSLENIVQPPGEMNDRLDPSSFQTNDHPWTVPTVFQPQTFQRPSADSLPRGSARLTSQNLYSNVFKPADVVSPKIPSGFPIEDHETSPLDNSDAFLSTHLKLFPSASSNSFYESELPQGFQDYYNLGQFTDDDQVPTPLVAITITRLVVGFLLPSVIMIACYSFIVFRMQRGRFAKSQSKTFRVAVVVVAVFLVCWTPYHIFGVLSLLTDPETPLGKTLMSWDHVCIALASANSCFNPFLYALLGKDFRKKARQSIQGILEAAFSEELTRSTHCPSNNVISERNSTTV

SEQ ID NO: 162 - protein, 481 aa, Homo sapiens
  source 1..481: note = sp|P31751|AKT2_HUMAN RAC-beta serine/threonine-protein kinase OS=Homo sapiens OX=9606; GN = AKT2 PE=1 SV=2
MNEVSVIKEGWLHKRGEYIKTWRPRYFLLKSDGSFIGYKERPEAPDQTLPPLNNFSVAECQLMKTERPRPNTFVIRCLQWTTVIERTFHVDSPDEREEWMRAIQMVANSLKQRAPGEDPMDYKCGSPSDSSTTEEMEVAVSKARAKVTMNDFDYLKLLGKGTFGKVILVREKATGRYYAMKILRKEVIIAKDEVAHTVTESRVLQNTRHPFLTALKYAFQTHDRLCFVMEYANGGELFFHLSRERVFTEERARFYGAEIVSALEYLHSRDVVYRDIKLENLMLDKDGHIKITDFGLCKEGISDGATMKTFCGTPEYLAPEVLEDNDYGRAVDWWGLGVVMYEMMCGRLPFYNQDHERLFELILMEEIRFPRTLSPEAKSLLAGLLKKDPKQRLGGGPSDAKEVMEHRFFLSINWQDVVQKKLLPPFKPQVTSEVDTRYFDDEFTAQSITITPPDRYDSLGLLELDQRTHFPQFSYSASIRE

SEQ ID NO: 163 - protein, 480 aa, Homo sapiens
  source 1..480: note = sp|P31930|QCR1_HUMAN Cytochrome b-c1 complex subunit 1, mitochondrial OS=Homo sapiens OX=9606 GN=UQCRC1 PE=1; SV = 3
MAASVVCRAATAGAQVLLRARRSPALLRTPALRSTATFAQALQFVPETQVSLLDNGLRVASEQSSQPTCTVGVWIDVGSRFETEKNNGAGYFLEHLAFKGTKNRPGSALEKEVESMGAHLNAYSTREHTAYYIKALSKDLPKAVELLGDIVQNCSLEDSQIEKERDVILREMQENDASMRDVVFNYLHATAFQGTPLAQAVEGPSENVRKLSRADLTEYLSTHYKAPRMVLAAAGGVEHQQLLDLAQKHLGGIPWTYAEDAVPTLTPCRFTGSEIRHRDDALPFAHVAIAVEGPGWASPDNVALQVANAIIGHYDCTYGGGVHLSSPLASGAVANKLCQSFQTFSICYAETGLLGAHFVCDRMKIDDMMFVLQGQWMRLCTSATESEVARGKNILRNALVSHLDGTTPVCEDIGRSLLTYGRRIPLAEWESRIAEVDASVVREICSKYIYDQCPAVAGYGPIEQLPDYNRIRSGMFWLRF

SEQ ID NO: 164 - protein, 359 aa, Homo sapiens
  source 1..359: note = sp|Q96A47|ISL2_HUMAN Insulin gene enhancer protein ISL-2 OS=Homo sapiens OX=9606 GN=ISL2 PE=1 SV=1
MVDIIFHYPFLGAMGDHSKKKPGTAMCVGCGSQIHDQFILRVSPDLEWHAACLKCAECSQYLDETCTCFVRDGKTYCKRDYVRLFGIKCAKCQVGFSSSDLVMRARDSVYHIECFRCSVCSRQLLPGDEFSLREHELLCRADHGLLLERAAAGSPRSPGPLPGARGLHLPDAGSGRQPALRPHVHKQTEKTTRVRTVLNEKQLHTLRTCYAANPRPDALMKEQLVEMTGLSPRVIRVWFQNKRCKDKKKSILMKQLQQQQHSDKTSLQGLTGTPLVAGSPIRHENAVQGSAVEVQTYQPPWKALSEFALQSDLDQPAFQQLVSFSESGSLGNSSGSDVTSLSSQLPDTPNSMVPSPVET

SEQ ID NO: 165 - protein, 1103 aa, Homo sapiens
  source 1..1103: note = sp|Q02846|GUC2D_HUMAN Retinal guanylyl cyclase 1; OS = Homo sapiens OX=9606 GN=GUCY2D PE=1 SV=2
MTACARRAGGLPDPGLCGPAWWAPSLPRLPRALPRLPLLLLLLLLQPPALSAVFTVGVLGPWACDPIFSRARPDLAARLAAARLNRDPGLAGGPRFEVALLPEPCRTPGSLGAVSSALARVSGLVGPVNPAACRPAELLAEEAGIALVPWGCPWTQAEGTTAPAVTPAADALYALLRAFGWARVALVTAPQDLWVEAGRSLSTALRARGLPVASVTSMEPLDLSGAREALRKVRDGPRVTAVIMVMHSVLLGGEEQRYLLEAAEELGLTDGSLVFLPFDTIHYALSPGPEALAALANSSQLRRAHDAVLTLTRHCPSEGSVLDSLRRAQERRELPSDLNLQQVSPLFGTIYDAVFLLARGVAEARAAAGGRWVSGAAVARHIRDAQVPGFCGDLGGDEEPPFVLLDTDAAGDRLFATYMLDPARGSFLSAGTRMHFPRGGSAPGPDPSCWFDPNNICGGGLEPGLVFLGFLLVVGMGLAGAFLAHYVRHRLLHMQMVSGPNKIILTVDDITFLHPHGGTSRKVAQGSRSSLGARSMSDIRSGPSQHLDSPNIGVYEGDRVWLKKFPGDQHIAIRPATKTAFSKLQELRHENVALYLGLFLARGAEGPAALWEGNLAVVSEHCTRGSLQDLLAQREIKLDWMFKSSLLLDLIKGIRYLHHRGVAHGRLKSRNCIVDGRFVLKITDHGHGRLLEAQKVLPEPPRAEDQLWTAPELLRDPALERRGTLAGDVFSLAIIMQEVVCRSAPYAMLELTPEEVVQRVRSPPPLCRPLVSMDQAPVECILLMKQCWAEQPELRPSMDHTFDLFKNINKGRKTNIIDSMLRMLEQYSSNLEDLIRERTEELELEKQKTDRLLTQMLPPSVAEALKTGTPVEPEYFEQVTLYFSDIVGFTTISAMSEPIEVVDLLNDLYTLFDAIIGSHDVYKVETIGDAYMVASGLPQRNGQRHAAEIANMSLDILSAVGTFRMRHMPEVPVRIRIGLHSGPCVAGVVGLTMPRYCLFGDTVNTASRMESTGLPYRIHVNLSTVGILRALDSGYQVELRGRTELKGKGAEDTFWLVGRRGFNKPIPKPPDLQPGSSNHGISLQEIPPERRRKLEKARPGQFS

SEQ ID NO: 166 - protein, 470 aa, Homo sapiens
  source 1..470: note = sp|Q9H295|DCSTP_HUMAN Dendritic cell-specific transmembrane protein OS=Homo sapiens OX=9606 GN=DCSTAMP; PE = 1 SV=1
MGIWTSGTDIFLSLWEIYVSPRSPGWMDFIQHLGVCCLVALISVGLLSVAACWFLPSIIAAAASWIITCVLLCCSKHARCFILLVFLSCGLREGRNALIAAGTGIVILGHVENIFHNFKGLLDGMTCNLRAKSFSIHFPLLKKYIEAIQWIYGLATPLSVFDDLVSWNQTLAVSLFSPSHVLEAQLNDSKGEVLSVLYQMATTTEVLSSLGQKLLAFAGLSLVLLGTGLFMKRFLGPCGWKYENIYITRQFVQFDERERHQQRPCVLPLNKEERRKYVIIPTFWPTPKERKNLGLFFLPILIHLCIWVLFAAVDYLLYRLIFSVSKQFQSLPGFEVHLKLHGEKQGTQDIIHDSSFNISVFEPNCIPKPKFLLSETWVPLSVILLILVMLGLLSSILMQLKILVSASFYPSVERKRIQYLHAKLLKKRSKQPLGEVKRRLSLYLTKIHFWLPVLKMIRKKQMDMASADKS

SEQ ID NO: 167 - protein, 864 aa, Homo sapiens
  source 1..864: note = sp|Q9UBC2|EP15R_HUMAN Epidermal growth factor receptor substrate 15-like 1 OS=Homo sapiens OX=9606; GN = EPS15L1 PE=1 SV=1
MAAPLIPLSQQIPTGNSLYESYYKQVDPAYTGRVGASEAALFLKKSGLSDIILGKIWDLADPEGKGFLDKQGFYVALRLVACAQSGHEVTLSNLNLSMPPPKFHDTSSPLMVTPPSAEAHWAVRVEEKAKFDGIFESLLPINGLLSGDKVKPVLMNSKLPLDVLGRVWDLSDIDKDGHLDRDEFAVAMHLVYRALEKEPVPSALPPSLIPPSKRKKTVFPGAVPVLPASPPPKDSLRSTPSHGSVSSLNSTGSLSPKHSLKQTQPTVNWVVPVADKMRFDEIFLKTDLDLDGYVSGQEVKEIFMHSGLTQNLLAHIWALADTRQTGKLSKDQFALAMYFIQQKVSKGIDPPQVLSPDMVPPSERGTPGPDSSGSLGSGEFTGVKELDDISQEIAQLQREKYSLEQDIREKEEAIRQKTSEVQELQNDLDRETSSLQELEAQKQDAQDRLDEMDQQKAKLRDMLSDVRQKCQDETQMISSLKTQIQSQESDLKSQEDDLNRAKSELNRLQQEETQLEQSIQAGRVQLETIIKSLKSTQDEINQARSKLSQLHESRQEAHRSLEQYDQVLDGAHGASLTDLANLSEGVSLAERGSFGAMDDPFKNKALLFSNNTQELHPDPFQTEDPFKSDPFKGADPFKGDPFQNDPFAEQQTTSTDPFGGDPFKESDPFRGSATDDFFKKQTKNDPFTSDPFTKNPSLPSKLDPFESSDPFSSSSVSSKGSDPFGTLDPFGSGSFNSAEGFADFSQMSKPPPSGPFTSSLGGAGFSDDPFKSKQDTPALPPKKPAPPRPKPPSGKSTPVSQLGSADFPEAPDPFQPLGADSGDPFQSKKGFGDPFSGKDPFVPSSAAKPSKASASGFADFTSVS

SEQ ID NO: 168 - protein, 831 aa, Homo sapiens
  source 1..831: note = sp|Q96MT3|PRIC1_HUMAN Prickle-like protein 1 OS=Homo sapiens OX=9606 GN=PRICKLE1 PE=1 SV=2
MPLEMEPKMSKLAFGCQRSSTSDDDSGCALEEYAWVPPGLRPEQIQLYFACLPEEKVPYVNSPGEKHRIKQLLYQLPPHDNEVRYCQSLSEEEKKELQVFSAQRKKEALGRGTIKLLSRAVMHAVCEQCGLKINGGEVAVFASRAGPGVCWHPSCFVCFTCNELLVDLIYFYQDGKIHCGRHHAELLKPRCSACDEIIFADECTEAEGRHWHMKHFCCLECETVLGGQRYIMKDGRPFCCGCFESLYAEYCETCGEHIGVDHAQMTYDGQHWHATEACFSCAQCKASLLGCPFLPKQGQIYCSKTCSLGEDVHASDSSDSAFQSARSRDSRRSVRMGKSSRSADQCRQSLLLSPALNYKFPGLSGNADDTLSRKLDDLSLSRQGTSFASEEFWKGRVEQETPEDPEEWADHEDYMTQLLLKFGDKSLFQPQPNEMDIRASEHWISDNMVKSKTELKQNNQSLASKKYQSDMYWAQSQDGLGDSAYGSHPGPASSRRLQELELDHGASGYNHDETQWYEDSLECLSDLKPEQSVRDSMDSLALSNITGASVDGENKPRPSLYSLQNFEEMETEDCEKMSNMGTLNSSMLHRSAESLKSLSSELCPEKILPEEKPVHLPVLRRSKSQSRPQQVKFSDDVIDNGNYDIEIRQPPMSERTRRRVYNFEERGSRSHHHRRRRSRKSRSDNALNLVTERKYSPKDRLRLYTPDNYEKFIQNKSAREIQAYIQNADLYGQYAHATSDYGLQNPGMNRFLGLYGEDDDSWCSSSSSSSDSEEEGYFLGQPIPQPRPQRFAYYTDDLSSPPSALPTPQFGQRTTKSKKKKGHKGKNCIIS

SEQ ID NO: 169 - protein, 1798 aa, Homo sapiens
  source 1..1798: note = sp|P55268|LAMB2_HUMAN Laminin subunit beta-2 OS=Homo sapiens OX=9606 GN=LAMB2 PE=1 SV=2
MELTSRERGRGQPLPWELRLGLLLSVLAATLAQAPAPDVPGCSRGSCYPATGDLLVGRADRLTASSTCGLNGPQPYCIVSHLQDEKKCFLCDSRRPFSARDNPHSHRIQNVVTSFAPQRRAAWWQSENGIPAVTIQLDLEAEFHFTHLIMTFKTFRPAAMLVERSADFGRTWHVYRYFSYDCGADFPGVPLAPPRHWDDVVCESRYSEIEPSTEGEVIYRVLDPAIPIPDPYSSRIQNLLKITNLRVNLTRLHTLGDNLLDPRREIREKYYYALYELVVRGNCFCYGHASECAPAPGAPAHAEGMVHGACICKHNTRGLNCEQCQDFYRDLPWRPAEDGHSHACRKCECHGHTHSCHFDMAVYLASGNVSGGVCDGCQHNTAGRHCELCRPFFYRDPTKDLRDPAVCRSCDCDPMGSQDGGRCDSHDDPALGLVSGQCRCKEHVVGTRCQQCRDGFFGLSISDRLGCRRCQCNARGTVPGSTPCDPNSGSCYCKRLVTGRGCDRCLPGHWGLSHDLLGCRPCDCDVGGALDPQCDEGTGQCHCRQHMVGRRCEQVQPGYFRPFLDHLIWEAEDTRGQVLDVVERLVTPGETPSWTGSGFVRLQEGQTLEFLVASVPKAMDYDLLLRLEPQVPEQWAELELIVQRPGPVPAHSLCGHLVPKDDRIQGTLQPHARYLIFPNPVCLEPGISYKLHLKLVRTGGSAQPETPYSGPGLLIDSLVLLPRVLVLEMFSGGDAAALERQATFERYQCHEEGLVPSKTSPSEACAPLLISLSTLIYNGALPCQCNPQGSLSSECNPHGGQCLCKPGVVGRRCDLCAPGYYGFGPTGCQACQCSHEGALSSLCEKTSGQCLCRTGAFGLRCDRCQRGQWGFPSCRPCVCNGHADECNTHTGACLGCRDHTGGEHCERCIAGFHGDPRLPYGGQCRPCPCPEGPGSQRHFATSCHQDEYSQQIVCHCRAGYTGLRCEACAPGHFGDPSRPGGRCQLCECSGNIDPMDPDACDPHTGQCLRCLHHTEGPHCAHCKPGFHGQAARQSCHRCTCNLLGTNPQQCPSPDQCHCDPSSGQCPCLPNVQGPSCDRCAPNFWNLTSGHGCQPCACHPSRARGPTCNEFTGQCHCRAGFGGRTCSECQELHWGDPGLQCHACDCDSRGIDTPQCHRFTGHCSCRPGVSGVRCDQCARGFSGIFPACHPCHACFGDWDRVVQDLAARTQRLEQRAQELQQTGVLGAFESSFWHMQEKLGIVQGIVGARNTSAASTAQLVEATEELRREIGEATEHLTQLEADLTDVQDENFNANHALSGLERDRLALNLTLRQLDQHLDLLKHSNFLGAYDSIRHAHSQSAEAERRANTSALAVPSPVSNSASARHRTEALMDAQKEDFNSKHMANQRALGKLSAHTHTLSLTDINELVCGAPGDAPCATSPCGGAGCRDEDGQPRCGGLSCNGAAATADLALGRARHTQAELQRALAEGGSILSRVAETRRQASEAQQRAQAALDKANASRGQVEQANQELQELIQSVKDFLNQEGADPDSIEMVATRVLELSIPASAEQIQHLAGAIAERVRSLADVDAILARTVGDVRRAEQLLQDARRARSWAEDEKQKAETVQAALEEAQRAQGIAQGAIRGAVADTRDTEQTLYQVQERMAGAERALSSAGERARQLDALLEALKLKRAGNSLAASTAEETAGSAQGRAQEAEQLLRGPLGDQYQTVKALAERKAQGVLAAQARAEQLRDEARDLLQAAQDKLQRLQELEGTYEENERALESKAAQLDGLEARMRSVLQAINLQVQIYNTCQ

SEQ ID NO: 170 - protein, 1610 aa, Homo sapiens
  source 1..1610: note = sp|Q96PN6|ADCYA_HUMAN Adenylate cyclase type 10; OS = Homo sapiens OX=9606 GN=ADCY10 PE=1 SV=3
MNTPKEEFQDWPIVRIAAHLPDLIVYGHFSPERPFMDYFDGVLMFVDISGFTAMTEKFSSAMYMDRGAEQLVEILNYHISAIVEKVLIFGGDILKFAGDALLALWRVERKQLKNIITVVIKCSLEIHGLFETQEWEEGLDIRVKIGLAAGHISMLVFGDETHSHFLVIGQAVDDVRLAQNMAQMNDVILSPNCWQLCDRSMIEIESVPDQRAVKVNFLKPPPNFNFDEFFTKCTTFMHYYPSGEHKNLLRLACTLKPDPELEMSLQKYVMESILKQIDNKQLQGYLSELRPVTIVFVNLMFEDQDKAEEIGPAIQDAYMHITSVLKIFQGQINKVFMFDKGCSFLCVFGFPGEKVPDELTHALECAMDIFDFCSQVHKIQTVSIGVASGIVFCGIVGHTVRHEYTVIGQKVNLAARMMMYYPGIVTCDSVTYNGSNLPAYFFKELPKKVMKGVADSGPLYQYWGRTEKVMFGMACLICNRKEDYPLLGRNKEINYFMYTMKKFLISNSSQVLMYEGLPGYGKSQILMKIEYLAQGKNHRIIAISLNKISFHQTFYTIQMFMANVLGLDTCKHYKERQTNLRNKVMTLLDEKFYCLLNDIFHVQFPISREISRMSTLKKQKQLEILFMKILKLIVKEERIIFIIDEAQFVDSTSWRFMEKLIRTLPIFIIMSLCPFVNIPCAAARAVIKNRNTTYIVIGAVQPNDISNKICLDLNVSCISKELDSYLGEGSCGIPFYCEELLKNLEHHEVLVFQQTESEEKTNRTWNNLFKYSIKLTEKLNMVTLHSDKESEEVCHLTSGVRLKNLSPPTSLKEISLIQLDSMRLSHQMLVRCAAIIGLTFTTELLFEILPCWNMKMMIKTLATLVESNIFYCFRNGKELQKALKQNDPSFEVHYRSLSLKPSEGMDHGEEEQLRELENEVIECHRIRFCNPMMQKTAYELWLKDQRKAMHLKCARFLEEDAHRCDHCRGRDFIPYHHFTVNIRLNALDMDAIKKMAMSHGFKTEEKLILSNSEIPETSAFFPENRSPEEIREKILNFFDHVLTKMKTSDEDIIPLESCQCEEILEIVILPLAHHFLALGENDKALYYFLEIASAYLIFCDNYMAYMYLNEGQKLLKTLKKDKSWSQTFESATFYSLKGEVCFNMGQIVLAKKMLRKALKLLNRIFPYNLISLFLHIHVEKNRHFHYVNRQAQESPPPGKKRLAQLYRQTVCLSLLWRIYSYSYLFHCKYYAHLAVMMQMNTALETQNCFQIIKAYLDYSLYHHLAGYKGVWFKYEVMAMEHIFNLPLKGEGIEIVAYVAETLVFNKLIMGHLDLAIELGSRALQMWALLQNPNRHYQSLCRLSRCLLLNSRYPQLIQVLGRLWELSVTQEHIFSKAFFYFVCLDILLYSGFVYRTFEECLEFIHQYENNRILKFHSGLLLGLYSSVAIWYARLQEWDNFYKFSNRAKNLLPRRTMTLTYYDGISRYMEGQVLHLQKQIKEQSENAQASGEELLKNLENLVAQNTTGPVFCPRLYHLMAYVCILMGDGQKCGLFLNTALRLSETQGNILEKCWLNMNKESWYSTSELKEDQWLQTILSLPSWEKIVAGRVNIQDLQKNKFLMRANTVDNHF

SEQ ID NO: 171 - protein, 624 aa, Homo sapiens
  source 1..624: note = sp|Q9H981|ARP8_HUMAN Actin-related protein 8 OS=Homo sapiens OX=9606 GN=ACTR8 PE=1 SV=2
MTQAEKGDTENGKEKGGEKEKEQRGVKRPIVPALVPESLQEQIQSNFIIVIHPGSTTLRIGRATDTLPASIPHVIARRHKQQGQPLYKDSWLLREGLNKPESNEQRQNGLKMVDQAIWSKKMSNGTRRIPVSPEQARSYNKQMRPAILDHCSGNKWTNTSHHPEYLVGEEALYVNPLDCYNIHWPIRRGQLNIHPGPGGSLTAVLADIEVIWSHAIQKYLEIPLKDLKYYRCILLIPDIYNKQHVKELVNMILMKMGFSGIVVHQESVCATYGSGLSSTCIVDVGDQKTSVCCVEDGVSHRNTRLCLAYGGSDVSRCFYWLMQRAGFPYRECQLTNKMDCLLLQHLKETFCHLDQDISGLQDHEFQIRHPDSPALLYQFRLGDEKLQAPMALFYPATFGIVGQKMTTLQHRSQGDPEDPHDEHYLLATQSKQEQSAKATADRKSASKPIGFEGDLRGQSSDLPERLHSQEVDLGSAQGDGLMAGNDSEEALTALMSRKTAISLFEGKALGLDKAILHSIDCCSSDDTKKKMYSSILVVGGGLMFHKAQEFLQHRILNKMPPSFRRIIENVDVITRPKDMDPRLIAWKGGAVLACLDTTQELWIYQREWQRFGVRMLRERAAFVW

SEQ ID NO: 172 - protein, 528 aa, Homo sapiens
  source 1..528: note = sp|Q9H0R6|GATA_HUMAN Glutamyl-tRNA(Gln) amidotransferase subunit A, mitochondrial OS=Homo sapiens; OX = 9606 GN=QRSL1 PE=1 SV=2
MLGRSLREVSAALKQGQITPTELCQKCLSLIKKTKFLNAYITVSEEVALKQAEESEKRYKNGQSLGDLDGIPIAVKDNFSTSGIETTCASNMLKGYIPPYNATVVQKLLDQGALLMGKTNLDEFAMGSGSTDGVFGPVKNPWSYSKQYREKRKQNPHSENEDSDWLITGGSSGGSAAAVSAFTCYAALGSDTGGSTRNPAAHCGLVGFKPSYGLVSRHGLIPLVNSMDVPGILTRCVDDAAIVLGALAGPDPRDSTTVHEPINKPFMLPSLADVSKLCIGIPKEYLVPELSSEVQSLWSKAADLFESEGAKVIEVSLPHTSYSIVCYHVLCTSEVASNMARFDGLQYGHRCDIDVSTEAMYAATRREGFNDVVRGRILSGNFFLLKENYENYFVKAQKVRRLIANDFVNAFNSGVDVLLTPTTLSEAVPYLEFIKEDNRTRSAQDDIFTQAVNMAGLPAVSIPVALSNQGLPIGLQFIGRAFCDQQLLTVAKWFEKQVQFPVIQLQELMDDCSAVLENEKLASVSLKQ

SEQ ID NO: 173 - protein, 325 aa, Homo sapiens
  source 1..325: note = sp|P33032|MC5R_HUMAN Melanocortin receptor 5 OS=Homo sapiens OX=9606 GN=MC5R PE=1 SV=3
MNSSFHLHFLDLNLNATEGNLSGPNVKNKSSPCEDMGIAVEVFLTLGVISLLENILVIGAIVKNKNLHSPMYFFVCSLAVADMLVSMSSAWETITIYLLNNKHLVIADAFVRHIDNVFDSMICISVVASMCSLLAIAVDRYVTIFYALRYHHIMTARRSGAIIAGIWAFCTGCGIVFILYSESTYVILCLISMFFAMLFLLVSLYIHMFLLARTHVKRIAALPGASSARQRTSMQGAVTVTMLLGVFTVCWAPFFLHLTLMLSCPQNLYCSRFMSHFNMYLILIMCNSVMDPLIYAFRSQEMRKTFKEIICCRGFRIACSFPRRD

SEQ ID NO: 174 - protein, 349 aa, Homo sapiens
  source 1..349: note = sp|Q96BW5|PTER_HUMAN Phosphotriesterase-related protein OS=Homo sapiens OX=9606 GN=PTER PE=1 SV=1
MSSLSGKVQTVLGLVEPSKLGRTLTHEHLAMTFDCCYCPPPPCQEAISKEPIVMKNLYWIQKNAYSHKENLQLNQETEAIKEELLYFKANGGGALVENTTTGISRDTQTLKRLAEETGVHIISGAGFYVDATHSSETRAMSVEQLTDVLMNEILHGADGTSIKCGIIGEIGCSWPLTESERKVLQATAHAQAQLGCPVIIHPGRSSRAPFQIIRILQEAGADISKTVMSHLDRTILDKKELLEFAQLGCYLEYDLFGTELLHYQLGPDIDMPDDNKRIRRVRLLVEEGCEDRILVAHDIHTKTRLMKYGGHGYSHILTNVVPKMLLRGITENVLDKILIENPKQWLTFK

SEQ ID NO: 175 - protein, 798 aa, Homo sapiens
  source 1..798: note = sp|Q9Y5E7|PCDB2_HUMAN Protocadherin beta-2 OS=Homo sapiens OX=9606 GN=PCDHB2 PE=1 SV=1
MEAGEGKERVPKQRQVLIFFVLLGIAQASCQPRHYSVAEETESGSFVANLLKDLGLEIGELAVRGARVVSKGKKMHLQFDRQTGDLLLNEKLDREELCGPTEPCVLPFQVLLENPLQFFQAELRIRDVNDHSPVFLDKEILLKIPESITPGTTFLIERAQDLDVGTNSLQNYTISPNFHFHLNLQDSLDGIILPQLVLNRALDREEQPEIRLTLTALDGGSPPRSGTALVRIEVVDINDNVPEFAKLLYEVQIPEDSPVGSQVAIVSARDLDIGTNGEISYAFSQASEDIRKTFRLSAKSGELLLRQKLDFESIQTYTVNIQATDGGGLSGTCVVFVQVMDLNDNPPELTMSTLINQIPENLQDTLIAVFSVSDPDSGDNGRMVCSIQDDLPFFLKPSVENFYTLVISTALDRETRSEYNITITVTDFGTPRLKTEHNITVLVSDVNDNAPAFTQTSYTLFVRENNSPALHIGSVSATDRDSGTNAQVTYSLLPPQDPHLPLASLVSINADNGHLFALQSLDYEALQAFEFRVGAADRGSPALSSEALVRVLVLDANDNSPFVLYPLQNGSAPCTELVPRAAEPGYLVTKVVAVDGDSGQNAWLSYQLLKATEPGLFGVWAHNGEVRTARLLRERDAAKQRLVVLVKDNGEPPRSATATLHVLLVDGFSQPYLLLPEAAPAQAQADLLTVYLVVALASVSSLFLFSVLLFVAVRLCRRSRAASVGRCSVPEGPFPGQMVDVSGTGTLSQSYQYEVCLTGGSGTNEFKFLKPIIPNFVAQGAERVSEANPSFRKSFEFT

SEQ ID NO: 176 - protein, 467 aa, Homo sapiens
  source 1..467: note = sp|Q14916|NPT1_HUMAN Sodium-dependent phosphate transport protein 1 OS=Homo sapiens OX=9606 GN=SLC17A1; PE = 1 SV=2
MQMDNRLPPKKVPGFCSFRYGLSFLVHCCNVIITAQRACLNLTMVVMVNSTDPHGLPNTSTKKLLDNIKNPMYNWSPDIQGIILSSTSYGVIIIQVPVGYFSGIYSTKKMIGFALCLSSVLSLLIPPAAGIGVAWVVVCRAVQGAAQGIVATAQFEIYVKWAPPLERGRLTSMSTSGFLLGPFIVLLVTGVICESLGWPMVFYIFGACGCAVCLLWFVLFYDDPKDHPCISISEKEYITSSLVQQVSSSRQSLPIKAILKSLPVWAISTGSFTFFWSHNIMTLYTPMFINSMLHVNIKENGFLSSLPYLFAWICGNLAGQLSDFFLTRNILSVIAVRKLFTAAGFLLPAIFGVCLPYLSSTFYSIVIFLILAGATGSFCLGGVFINGLDIAPRYFGFIKACSTLTGMIGGLIASTLTGLILKQDPESAWFKTFILMAAINVTGLIFYLIVATAEIQDWAKEKQHTRL

SEQ ID NO: 177 - protein, 1053 aa, Homo sapiens
  source 1..1053: note = sp|Q9BXX0|EMIL2_HUMAN EMILIN-2 OS=Homo sapiens; OX = 9606 GN=EMILIN2 PE=1 SV=3
MWQPRRPWPRVPWRWALALLALVGAGLCHAGPQPGYPARPSARNKNWCAYIVNKNVSCSVLEGSESFIQAQYNCAWNQMPCPSALVYRVNFRPRYVTRYKTVTQLEWRCCPGFRGGDCQEGPKDPVKTLRPTPARPRNSLKKATDNEPSQFSEPRKTLSPTGTAQPSWGVDPKEGPQELQEKKIQVLEEKVLRLTRTVLDLQSSLAGVSENLKHATQDDASRTRAPGLSSQHPKPDTTVSGDTETGQSPGVFNTKESGMKDIKSELAEVKDTLKNKSDKLEELDGKVKGYEGQLRQLQEAAQGPTVTMTTNELYQAYVDSKIDALREELMEGMDRKLADLKNSCEYKLTGLQQQCDDYGSSYLGVIELIGEKETSLRKEINNLRARLQEPSAQANCCDSEKNGDIGQQIKTLDQKIERVAEATRMLNGRLDNEFDRLIVPEPDVDFDAKWNELDARINVTEKNAEEHCFYIEETLRGAINGEVGDLKQLVDQKIQSLEDRLGSVLLQMTNNTGAELSPPGAAALPGVSGSGDERVMMELNHLKDKVQVVEDICLLNIQGKPHGMEGALPNREDRAVRDSLHLLKSLNDTMHRKFQETEQTIQKLQQDFSFLYSQLNHTENDVTHLQKEMSNCRAGENAGMGRFTKVGEQERTVDTLPSPQHPVAHCCSQLEERWQRLQSQVISELDACKECTQGVQREVSMVEGRVSHMEKTCSKLDSISGNLQRIKEGLNKHVSSLWNCVRQMNGTLRSHSRDISGLKNSVQQFYSHVFQISTDLQDLVKFQPSAKAPSPPPPAEAPKEPLQPEPAPPRPSGPATAEDPGRRPVLPQRPPEERPPQPPGSTGVIAETGQAGPPAGAGVSGRGLPRGVDGQTGSGTVPGAEGFAGAPGYPKSPPVASPGAPVPSLVSFSAGLTQKPFPSDGGVVLFNKVLVNDGDVYNPSTGVFTAPYDGRYLITATLTPERDAYVEAVLSVSNASVAQLHTAGYRREFLEYHRPPGALHTCGGPGAFHLIVHLKAGDAVNVVVTGGKLAHTDFDEMYSTFSGVFLYPFLSHL

SEQ ID NO: 178 - protein, 158 aa, Homo sapiens [sequence omitted]

SEQ ID NO: 179 - protein, 519 aa, Homo sapiens
  source 1..519: note = sp|Q9BU19|ZN692_HUMAN Zinc finger protein 692; OS = Homo sapiens OX=9606 GN=ZNF692 PE=1 SV=1
MASSPAVDVSCRRREKRRQLDARRSKCRIRLGGHMEQWCLLKERLGFSLHSQLAKFLLDRYTSSGCVLCAGPEPLPPKGLQYLVLLSHAHSRECSLVPGLRGPGGQDGGLVWECSAGHTFSWGPSLSPTPSEAPKPASLPHTTRRSWCSEATSGQELADLESEHDERTQEARLPRRVGPPPETFPPPGEEEGEEEEDNDEDEEEMLSDASLWTYSSSPDDSEPDAPRLLPSPVTCTPKEGETPPAPAALSSPLAVPALSASSLSSRAPPPAEVRVQPQLSRTPQAAQQTEALASTGSQAQSAPTPAWDEDTAQIGPKRIRKAAKRELMPCDFPGCGRIFSNRQYLNHHKKYQHIHQKSFSCPEPACGKSFNFKKHLKEHMKLHSDTRDYICEFCARSFRTSSNLVIHRRIHTGEKPLQCEICGFTCRQKASLNWHQRKHAETVAALRFPCEFCGKRFEKPDSVAAHRSKSHPALLLAPQESPSGPLEPCPSISAPGPLGSSEGSRPSASPQAPTLLPQQ

SEQ ID NO: 180 - protein, 610 aa, Homo sapiens
  source 1..610: note = sp|P16581|LYAM2_HUMAN E-selectin OS=Homo sapiens; OX = 9606 GN=SELE PE=1 SV=1
MIASQFLSALTLVLLIKESGAWSYNTSTEAMTYDEASAYCQQRYTHLVAIQNKEEIEYLNSILSYSPSYYWIGIRKVNNVWVWVGTQKPLTEEAKNWAPGEPNNRQKDEDCVEIYIKREKDVGMWNDERCSKKKLALCYTAACTNTSCSGHGECVETINNYTCKCDPGFSGLKCEQIVNCTALESPEHGSLVCSHPLGNFSYNSSCSISCDRGYLPSSMETMQCMSSGEWSAPIPACNVVECDAVTNPANGFVECFQNPGSFPWNTTCTFDCEEGFELMGAQSLQCTSSGNWDNEKPTCKAVTCRAVRQPQNGSVRCSHSPAGEFTFKSSCNFTCEEGFMLQGPAQVECTTQGQWTQQIPVCEAFQCTALSNPERGYMNCLPSASGSFRYGSSCEFSCEQGFVLKGSKRLQCGPTGEWDNEKPTCEAVRCDAVHQPPKGLVRCAHSPIGEFTYKSSCAFSCEEGFELHGSTQLECTSQGQWTEEVPSCQVVKCSSLAVPGKINMSCSGEPVFGTVCKFACPEGWTLNGSAARTCGATGHWSGLLPTCEAPTESNIPLVAGLSAAGLSLLTLAPFLLWLRKCLRKAKKFVPASSCQSLESDGSYQKPSYIL

SEQ ID NO: 181 - protein, 499 aa, Homo sapiens
  source 1..499: note = sp|Q99640|PMYT1_HUMAN Membrane-associated tyrosine- and threonine-specific cdc2-inhibitory kinase OS=Homo sapiens OX=9606 GN=PKMYT1 PE=1 SV=1
MLERPPALAMPMPTEGTPPPLSGTPIPVPAYFRHAEPGFSLKRPRGLSRSLPPPPPAKGSIPISRLFPPRTPGWHQLQPRRVSFRGEASETLQSPGYDPSRPESFFQQSFQRLSRLGHGSYGEVFKVRSKEDGRLYAVKRSMSPFRGPKDRARKLAEVGSHEKVGQHPCCVRLEQAWEEGGILYLQTELCGPSLQQHCEAWGASLPEAQVWGYLRDTLLALAHLHSQGLVHLDVKPANIFLGPRGRCKLGDFGLLVELGTAGAGEVQEGDPRYMAPELLQGSYGTAADVFSLGLTILEVACNMELPHGGEGWQQLRQGYLPPEFTAGLSSELRSVLVMMLEPDPKLRATAEALLALPVLRQPRAWGVLWCMAAEALSRGWALWQALLALLCWLWHGLAHPASWLQPLGPPATPPGSPPCSLLLDSSLSSNWDDDSLGPSLSPEAVLARTVGSTSTPRSRCTPRDALDLSDINSEPPRGSFPSFEPRNLLSLFEDTLDPT

SEQ ID NO: 182 - protein, 486 aa, Homo sapiens
  source 1..486: note = sp|Q9H4A9|DPEP2_HUMAN Dipeptidase 2 OS=Homo sapiens; OX = 9606 GN=DPEP2 PE=1 SV=3
MQPSGLEGPGTFGRWPLLSLLLLLLLLQPVTCAYTTPGPPRALTTLGAPRAHTMPGTYAPSTTLSSPSTQGLQEQARALMRDFPLVDGHNDLPLVLRQVYQKGLQDVNLRNFSYGQTSLDRLRDGLVGAQFWSAYVPCQTQDRDALRLTLEQIDLIRRMCASYSELELVTSAKALNDTQKLACLIGVEGGHSLDNSLSILRTFYMLGVRYLTLTHTCNTPWAESSAKGVHSFYNNISGLTDFGEKVVAEMNRLGMMVDLSHVSDAVARRALEVSQAPVIFSHSAARGVCNSARNVPDDILQLLKKNGGVVMVSLSMGVIQCNPSANVSTVADHFDHIKAVIGSKFIGIGGDYDGAGKFPQGLEDVSTYPVLIEELLSRGWSEEELQGVLRGNLLRVFRQVEKVQEENKWQSPLEDKFPDEQLSSSCHSDLSRLRQRQSLTSGQELTEIPIHWTAKLPAKWSVSESSPHMAPVLAVVATFPVLILWL

SEQ ID NO: 183 - protein, 132 aa, Homo sapiens
  source 1..132: note = sp|P02689|MYP2_HUMAN Myelin P2 protein OS=Homo sapiens OX=9606 GN=PMP2 PE=1 SV=3
MSNKFLGTWKLVSSENFDDYMKALGVGLATRKLGNLAKPTVIISKKGDIITIRTESTFKNTEISFKLGQEFEETTADNRKTKSIVTLQRGSLNQVQRWDGKETTIKRKLVNGKMVAECKMKGVVCTRIYEKV

SEQ ID NO: 184 - protein, 666 aa, Homo sapiens
  source 1..666: note = sp|Q5FVE4|ACBG2_HUMAN Long-chain-fatty-acid--CoA ligase ACSBG2 OS=Homo sapiens OX=9606 GN=ACSBG2 PE=1 SV=2
MTGTPKTQEGAKDLEVDMNKTEVTPRLWTTCRDGEVLLRLSKHGPGHETPMTIPEFFRESVNRFGTYPALASKNGKKWEILNFNQYYEACRKAAKSLIKLGLERFHGVGILGFNSAEWFITAVGAILAGGLCVGIYATNSAEVCQYVITHAKVNILLVENDQQLQKILSIPQSSLEPLKAIIQYRLPMKKNNNLYSWDDFMELGRSIPDTQLEQVIESQKANQCAVLIYTSGTTGIPKGVMLSHDNITWIAGAVTKDFKLTDKHETVVSYLPLSHIAAQMMDIWVPIKIGALTYFAQADALKGTLVSTLKEVKPTVFIGVPQIWEKIHEMVKKNSAKSMGLKKKAFVWARNIGFKVNSKKMLGKYNTPVSYRMAKTLVFSKVKTSLGLDHCHSFISGTAPLNQETAEFFLSLDIPIGELYGLSESSGPHTISNQNNYRLLSCGKILTGCKNMLFQQNKDGIGEICLWGRHIFMGYLESETETTEAIDDEGWLHSGDLGQLDGLGFLYVTGHIKEILITAGGENVPPIPVETLVKKKIPIISNAMLVGDKLKFLSMLLTLKCEMNQMSGEPLDKLNFEAINFCRGLGSQASTVTEIVKQQDPLVYKAIQQGINAVNQEAMNNAQRIEKWVILEKDFSIYGGELGPMMKLKRHFVAQKYKKQIDHMYH

SEQ ID NO: 185 - protein, 595 aa, Homo sapiens
  source 1..595: note = sp|Q9BZW2|S13A1_HUMAN Solute carrier family 13 member 1 OS=Homo sapiens OX=9606 GN=SLC13A1 PE=1 SV=1
MKFFSYILVYRRFLFVVFTVLVLLPLPIVLHTKEAECAYTLFVVATFWLTEALPLSVTALLPSLMLPMFGIMPSKKVASAYFKDFHLLLIGVICLATSIEKWNLHKRIALKMVMMVGVNPAWLTLGFMSSTAFLSMWLSNTSTAAMVMPIAEAVVQQIINAEAEVEATQMTYFNGSTNHGLEIDESVNGHEINERKEKTKPVPGYNNDTGKISSKVELEKNSGMRTKYRTKKGHVTRKLTCLCIAYSSTIGGLTTITGTSTNLIFAEYFNTRYPDCRCLNFGSWFTFSFPAALIILLLSWIWLQWLFLGFNFKEMFKCGKTKTVQQKACAEVIKQEYQKLGPIRYQEIVTLVLFIIMALLWFSRDPGFVPGWSALFSEYPGFATDSTVALLIGLLFFLIPAKTLTKTTPTGEIVAFDYSPLITWKEFQSFMPWDIAILVGGGFALADGCEESGLSKWIGNKLSPLGSLPAWLIILISSLMVTSLTEVASNPATITLFLPILSPLAEAIHVNPLYILIPSTLCTSFAFLLPVANPPNAIVFSYGHLKVIDMVKAGLGVNIVGVAVVMLGICTWIVPMFDLYTYPSWAPAMSNETMP

SEQ ID NO: 186 - protein, 160 aa, Homo sapiens
  source 1..160: note = sp|P12724|ECP_HUMAN Eosinophil cationic protein; OS = Homo sapiens OX=9606 GN=RNASE3 PE=1 SV=2
MVPKLFTSQICLLLLLGLMGVEGSLHARPPQFTRAQWFAIQHISLNPPRCTIAMRAINNYRWRCKNQNTFLRTTFANVVNVCGNQSIRCPHNRTLNNCHRSRFRVPLLHCDLINPGAQNISNCTYADRPGRRFYVVACDNRDPRDSPRYPVVPVHLDTTI

SEQ ID NO: 187 - protein, 685 aa, Homo sapiens
  source 1..685: note = sp|Q9NYY3|PLK2_HUMAN Serine/threonine-protein kinase PLK2 OS=Homo sapiens OX=9606 GN=PLK2 PE=1 SV=3
MELLRTITYQPAASTKMCEQALGKGCGADSKKKRPPQPPEESQPPQSQAQVPPAAPHHHHHHSHSGPEISRIIVDPTTGKRYCRGKVLGKGGFAKCYEMTDLTNNKVYAAKIIPHSRVAKPHQREKIDKEIELHRILHHKHVVQFYHYFEDKENIYILLEYCSRRSMAHILKARKVLTEPEVRYYLRQIVSGLKYLHEQEILHRDLKLGNFFINEAMELKVGDFGLAARLEPLEHRRRTICGTPNYLSPEVLNKQGHGCESDIWALGCVMYTMLLGRPPFETTNLKETYRCIREARYTMPSSLLAPAKHLIASMLSKNPEDRPSLDDIIRHDFFLQGFTPDRLSSSCCHTVPDFHLSSPAKNFFKKAAAALFGGKKDKARYIDTHNRVSKEDEDIYKLRHDLKKTSITQQPSKHRTDEELQPPTTTVARSGTPAVENKQQIGDAIRMIVRGTLGSCSSSSECLEDSTMGSVADTVARVLRGCLENMPEADCIPKEQLSTSFQWVTKWVDYSNKYGFGYQLSDHTVGVLFNNGAHMSLLPDKKTVHYYAELGQCSVFPATDAPEQFISQVTVLKYFSHYMEENLMDGGDLPSVTDIRRPRLYLLQWLKSDKALMMLFNDGTFQVNFYHDHTKIIICSQNEEYLLTYINEDRISTTFRLTTLLMSGCSSELKNRMEYALNMLLQRCN

SEQ ID NO: 188 - protein, 859 aa, Homo sapiens
  source 1..859: note = sp|Q12979|ABR_HUMAN Active breakpoint cluster region-related protein OS=Homo sapiens OX=9606 GN=ABR PE=1; SV = 2
MEPLSHRGLPRLSWIDTLYSNFSYGTDEYDGEGNEEQKGPPEGSETMPYIDESPTMSPQLSARSQGGGDGVSPTPPEGLAPGVEAGKGLEMRKLVLSGFLASEEIYINQLEALLLPMKPLKATATTSQPVLTIQQIETIFYKIQDIYEIHKEFYDNLCPKVQQWDSQVTMGHLFQKLASQLGVYKAFVDNYKVALETAEKCSQSNNQFQKISEELKVKGPKDSKDSHTSVTMEALLYKPIDRVTRSTLVLHDLLKHTPVDHPDYPLLQDALRISQNFLSSINEDIDPRRTAVTTPKGETRQLVKDGFLVEVSESSRKLRHVFLFTDVLLCAKLKKTSAGKHQQYDCKWYIPLADLVFPSPEESEASPQVHPFPDHELEDMKMKISALKSEIQKEKANKGQSRAIERLKKKMFENEFLLLLNSPTIPFRIHNRNGKSYLFLLSSDYERSEWREAIQKLQKKDLQAFVLSSVELQVLTGSCFKLRTVHNIPVTSNKDDDESPGLYGFLHVIVHSAKGFKQSANLYCTLEVDSFGYFVSKAKTRVFRDTAEPKWDEEFEIELEGSQSLRILCYEKCYDKTKVNKDNNEIVDKIMGKGQIQLDPQTVETKNWHTDVIEMNGIKVEFSMKFTSRDMSLKRTPSKKQTGVFGVKISVVTKRERSKVPYIVRQCVEEVEKRGIEEVGIYRISGVATDIQALKAVFDANNKDILLMLSDMDINAIAGTLKLYFRELPEPLLTDRLYPAFMEGIALSDPAAKENCMMHLLRSLPDPNLITFLFLLEHLKRVAEKEPINKMSLHNLATVFGPTLLRPSEVESKAHLTSAADIWSHDVMAQVQVLLYYLQHPPISFAELKRNTLYFSTDV

SEQ ID NO: 189 - protein, 395 aa, Homo sapiens
  source 1..395: note = sp|Q8NFZ6|VN1R2_HUMAN Vomeronasal type-1 receptor 2; OS = Homo sapiens OX=9606 GN=VN1R2 PE=2 SV=2
MTHTLYPTPFALYPINISAAWHLGPLPVSCFVSNKYQCSLAFGATTGLRVLVVVVPQTQLSFLSSLCLVSLFLHSLVSAHGEKPTKPVGLDPTLFQVVVGILGNFSLLYYYMFLYFRGYKPRSTDLILRHLTVADSLVILSKRIPETMATFGLKHFDNYFGCKFLLYAHRVGRGVSIGSTCLLSVFQVITINPRNSRWAEMKVKAPTYIGLSNILCWAFHMLVNAIFPIYTTGKWSNNNITKKGDLGYCSAPLSDEVTKSVYAALTSFHDVLCLGLMLWASSSIVLVLYRHKQQVQHICRNNLYPNSSPGNRAIQSILALVSTFALCYALSFITYVYLALFDNSSWWLVNTAALIIACFPTISPFVLMCRDPSRSRLCSICCRRNRRFFHDFRKM

SEQ ID NO: 190 - protein, 3333 aa, Homo sapiens
  source 1..3333: note = sp|Q16787|LAMA3_HUMAN Laminin subunit alpha-3; OS = Homo sapiens OX=9606 GN=LAMA3 PE=1 SV=2
MAAAARPRGRALGPVLPPTPLLLLVLRVLPACGATARDPGAAAGLSLHPTYFNLAEAARIWATATCGERGPGEGRPQPELYCKLVGGPTAPGSGHTIQGQFCDYCNSEDPRKAHPVTNAIDGSERWWQSPPLSSGTQYNRVNLTLDLGQLFHVAYILIKFANSPRPDLWVLERSVDFGSTYSPWQYFAHSKVDCLKEFGREANMAVTRDDDVLCVTEYSRIVPLENGEVVVSLINGRPGAKNFTFSHTLREFTKATNIRLRFLRTNTLLGHLISKAQRDPTVTRRYYYSIKDISIGGQCVCNGHAEVCNINNPEKLFRCECQHHTCGETCDRCCTGYNQRRWRPAAWEQSHECEACNCHGHASNCYYDPDVERQQASLNTQGIYAGGGVCINCQHNTAGVNCEQCAKGYYRPYGVPVDAPDGCIPCSCDPEHADGCEQGSGRCHCKPNFHGDNCEKCAIGYYNFPFCLRIPIFPVSTPSSEDPVAGDIKGCDCNLEGVLPEICDAHGRCLCRPGVEGPRCDTCRSGFYSFPICQACWCSALGSYQMPCSSVTGQCECRPGVTGQRCDRCLSGAYDFPHCQGSSSACDPAGTINSNLGYCQCKLHVEGPTCSRCKLLYWNLDKENPSGCSECKCHKAGTVSGTGECRQGDGDCHCKSHVGGDSCDTCEDGYFALEKSNYFGCQGCQCDIGGALSSMCSGPSGVCQCREHVVGKVCQRPENNYYFPDLHHMKYEIEDGSTPNGRDLRFGFDPLAFPEFSWRGYAQMTSVQNDVRITLNVGKSSGSLFRVILRYVNPGTEAVSGHITIYPSWGAAQSKEIIFLPSKEPAFVTVPGNGFADPFSITPGIWVACIKAEGVLLDYLVLLPRDYYEASVLQLPVTEPCAYAGPPQENCLLYQHLPVTRFPCTLACEARHFLLDGEPRPVAVRQPTPAHPVMVDLSGREVELHLRLRIPQVGHYVVVVEYSTEAAQLFVVDVNVKSSGSVLAGQVNIYSCNYSVLCRSAVIDHMSRIAMYELLADADIQLKGHMARFLLHQVCIIPIEEFSAEYVRPQVHCIASYGRFVNQSATCVSLAHETPPTALILDVLSGRPFPHLPQQSSPSVDVLPGVTLKAPQNQVTLRGRVPHLGRYVFVIHFYQAAHPTFPAQVSVDGGWPRAGSFHASFCPHVLGCRDQVIAEGQIEFDISEPEVAATVKVPEGKSLVLVRVLVVPAENYDYQILHKKSMDKSLEFITNCGKNSFYLDPQTASRFCKNSARSLVAFYHKGALPCECHPTGATGPHCSPEGGQCPCQPNVIGRQCTRCATGHYGFPRCKPCSCGRRLCEEMTGQCRCPPRTVRPQCEVCETHSFSFHPMAGCEGCNCSRRGTIEAAMPECDRDSGQCRCKPRITGRQCDRCASGFYRFPECVPCNCNRDGTEPGVCDPGTGACLCKENVEGTECNVCREGSFHLDPANLKGCTSCFCFGVNNQCHSSHKRRTKFVDMLGWHLETADRVDIPVSFNPGSNSMVADLQELPATIHSASWVAPTSYLGDKVSSYGGYLTYQAKSFGLPGDMVLLEKKPDVQLTGQHMSIIYEETNTPRPDRLHHGRVHVVEGNFRHASSRAPVSREELMTVLSRLADVRIQGLYFTETQRLTLSEVGLEEASDTGSGRIALAVEICACPPAYAGDSCQGCSPGYYRDHKGLYTGRCVPCNCNGHSNQCQDGSGICVNCQHNTAGEHCERCQEGYYGNAVHGSCRACPCPHTNSFATGCVVNGGDVRCSCKAGYTGTQCERCAPGYFGNPQKFGGSCQPCSCNSNGQLGSCHPLTGDCINQEPKDSSPAEECDDCDSCVMTLLNDLATMGEQLRLVKSQLQGLSASAGLLEQMRHMETQAKDLRNQLLNYRSAISNHGSKIEGLERELTDLNQEFETLQEKAQVNSRKAQTLNNNVNRATQSAKELDVKIKNVIRNVHILLKQISGTDGEGNNVPSGDFSREWAEAQRMMRELRNRNFGKHLREAEADKRESQLLLNRIRTWQKTHQGENNGLANSIRDSLNEYEAKLSDLRARLQEAAAQAKQANGLNQENERALGAIQRQVKEINSLQSDFTKYLTTADSSLLQTNIALQLMEKSQKEYEKLAASLNEARQELSDKVRELSRSAGKTSLVEEAEKHARSLQELAKQLEEIKRNASGDELVRCAVDAATAYENILNAIKAAEDAANRAASASESALQTVIKEDLPRKAKTLSSNSDKLLNEAKMTQKKLKQEVSPALNNLQQTLNIVTVQKEVIDTNLTTLRDGLHGIQRGDIDAMISSAKSMVRKANDITDEVLDGLNPIQTDVERIKDTYGRTQNEDFKKALTDADNSVNKLTNKLPDLWRKIESINQQLLPLGNISDNMDRIRELIQQARDAASKVAVPMRFNGKSGVEVRLPNDLEDLKGYTSLSLFLQRPNSRENGGTENMFVMYLGNKDASRDYIGMAVVDGQLTCVYNLGDREAELQVDQILTKSETKEAVMDRVKFQRIYQFARLNYTKGATSSKPETPGVYDMDGRNSNTLLNLDPENVVFYVGGYPPDFKLPSRLSFPPYKGCIELDDLNENVLSLYNFKKTFNLNTTEVEPCRRRKEESDKNYFEGTGYARVPTQPHAPIPTFGQTIQTTVDRGLLFFAENGDRFISLNIEDGKLMVRYKLNSELPKERGVGDAINNGRDHSIQIKIGKLQKRMWINVDVQNTIIDGEVFDFSTYYLGGIPIAIRERFNISTPAFRGCMKNLKKTSGVVRLNDTVGVTKKCSEDWKLVRSASFSRGGQLSFTDLGLPPTDHLQASFGFQTFQPSGILLDHQTWTRNLQVTLEDGYIELSTSDSGSPIFKSPQTYMDGLLHYVSVISDNSGLRLLIDDQLLRNSKRLKHISSSRQSLRLGGSNFEGCISNVFVQRLSLSPEVLDLTSNSLKRDVSLGGCSLNKPPFLMLLKGSTRFNKTKTFRINQLLQDTPVASPRSVKVWQDACSPLPKTQANHGALQFGDIPTSHLLFKLPQELLKPRSQFAVDMQTTSSRGLVFHTGTKNSFMALYLSKGRLVFALGTDGKKLRIKSKEKCNDGKWHTVVFGHDGEKGRLVVDGLRAREGSLPGNSTISIRAPVYLGSPPSGKPKSLPTNSFVGCLKNFQLDSKPLYTPSSSFGVSSCLGGPLEKGIYFSEEGGHVVLAHSVLLGPEFKLVFSIRPRSLTGILIHIGSQPGKHLCVYLEAGKVTASMDSGAGGTSTSVTPKQSLCDGQWHSVAVTIKQHILHLELDTDSSYTAGQIPFPPASTQEPLHLGGAPANLTTLRIPVWKSFFGCLRNIHVNHIPVPVTEALEVQGPVSLNGCPDQ

SEQ ID NO: 191 - protein, 213 aa, Homo sapiens
  source 1..213: note = sp|P61018|RAB4B_HUMAN Ras-related protein Rab-4B; OS = Homo sapiens OX=9606 GN=RAB4B PE=1 SV=1
MAETYDFLFKFLVIGSAGTGKSCLLHQFIENKFKQDSNHTIGVEFGSRVVNVGGKTVKLQIWDTAGQERFRSVTRSYYRGAAGALLVYDITSRETYNSLAAWLTDARTLASPNIVVILCGNKKDLDPEREVTFLEASRFAQENELMFLETSALTGENVEEAFLKCARTILNKIDSGELDPERMGSGIQYGDASLRQLRQPRSAQAVAPQPCGC

SEQ ID NO: 192 - protein, 538 aa, Homo sapiens
  source 1..538: note = sp|P57789|KCNKA_HUMAN Potassium channel subfamily K member 10 OS=Homo sapiens OX=9606 GN=KCNK10 PE=1 SV=1
MFFLYTDFFLSLVAVPAAAPVCQPKSATNGQPPAPAPTPTPRLSISSRATVVARMEGTSQGGLQTVMKWKTVVAIFVVVVVYLVTGGLVFRALEQPFESSQKNTIALEKAEFLRDHVCVSPQELETLIQHALDADNAGVSPIGNSSNNSSHWDLGSAFFFAGTVITTIGYGNIAPSTEGGKIFCILYAIFGIPLFGFLLAGIGDQLGTIFGKSIARVEKVFRKKQVSQTKIRVISTILFILAGCIVFVTIPAVIFKYIEGWTALESIYFVVVTLTTVGFGDFVAGGNAGINYREWYKPLVWFWILVGLAYFAAVLSMIGDWLRVLSKKTKEEVGEIKAHAAEWKANVTAEFRETRRRLSVEIHDKLQRAATIRSMERRRLGLDQRAHSLDMLSPEKRSVFAALDTGRFKASSQESINNRPNNLRLKGPEQLNKHGQGASEDNIINKFGSTSRLTKRKNKDLKKTLPEDVQKIYKTFRNYSLDEEKKEEETEKMCNSDNSSTAMLTDCIQQHAELENGMIPTDTKDREPENNSLLEDRN

SEQ ID NO: 193 - protein, 906 aa, Homo sapiens
  source 1..906: note = sp|P19022|CADH2_HUMAN Cadherin-2 OS=Homo sapiens; OX = 9606 GN=CDH2 PE=1 SV=4
MCRIAGALRTLLPLLAALLQASVEASGEIALCKTGFPEDVYSAVLSKDVHEGQPLLNVKFSNCNGKRKVQYESSEPADFKVDEDGMVYAVRSFPLSSEHAKFLIYAQDKETQEKWQVAVKLSLKPTLTEESVKESAEVEEIVFPRQFSKHSGHLQRQKRDWVIPPINLPENSRGPFPQELVRIRSDRDKNLSLRYSVTGPGADQPPTGIFIINPISGQLSVTKPLDREQIARFHLRAHAVDINGNQVENPIDIVINVIDMNDNRPEFLHQVWNGTVPEGSKPGTYVMTVTAIDADDPNALNGMLRYRIVSQAPSTPSPNMFTINNETGDIITVAAGLDREKVQQYTLIIQATDMEGNPTYGLSNTATAVITVTDVNDNPPEFTAMTFYGEVPENRVDIIVANLTVTDKDQPHTPAWNAVYRISGGDPTGRFAIQTDPNSNDGLVTVVKPIDFETNRMFVLTVAAENQVPLAKGIQHPPQSTATVSVTVIDVNENPYFAPNPKIIRQEEGLHAGTMLTTFTAQDPDRYMQQNIRYTKLSDPANWLKIDPVNGQITTIAVLDRESPNVKNNIYNATFLASDNGIPPMSGTGTLQIYLLDINDNAPQVLPQEAETCETPDPNSINITALDYDIDPNAGPFAFDLPLSPVTIKRNWTITRLNGDFAQLNLKIKFLEAGIYEVPIIITDSGNPPKSNISILRVKVCQCDSNGDCTDVDRIVGAGLGTGAIIAILLCIIILLILVLMFVVWMKRRDKERQAKQLLIDPEDDVRDNILKYDEEGGGEEDQDYDLSQLQQPDTVEPDAIKPVGIRRMDERPIHAEPQYPVRSAAPHPGDIGDFINEGLKAADNDPTAPPYDSLLVFDYEGSGSTAGSLSSLNSSSSGGEQDYDYLNDWGPRFKKLADMYGGGDD

SEQ ID NO: 194 - protein, 346 aa, Homo sapiens
  source 1..346: note = sp|Q9NS75|CLTR2_HUMAN Cysteinyl leukotriene receptor 2 OS=Homo sapiens OX=9606 GN=CYSLTR2 PE=1 SV=1
MERKFMSLQPSISVSEMEPNGTFSNNNSRNCTIENFKREFFPIVYLIIFFWGVLGNGLSIYVFLQPYKKSTSVNVFMLNLAISDLLFISTLPFRADYYLRGSNWIFGDLACRIMSYSLYVNMYSSIYFLTVLSVVRFLAMVHPFRLLHVTSIRSAWILCGIIWILIMASSIMLLDSGSEQNGSVTSCLELNLYKIAKLQTMNYIALVVGCLLPFFTLSICYLLIIRVLLKVEVPESGLRVSHRKALTTIIITLIIFFLCFLPYHTLRTVHLTTWKVGLCKDRLHKALVITLALAAANACFNPLLYYFAGENFKDRLKSALRKGHPQKAKTKCVFPVSVWLRKETRV

SEQ ID NO: 195 - protein, 419 aa, Homo sapiens
  source 1..419: note = sp|P21917|DRD4_HUMAN D(4) dopamine receptor OS=Homo sapiens OX=9606 GN=DRD4 PE=1 SV=3
MGNRSTADADGLLAGRGPAAGASAGASAGLAGQGAAALVGGVLLIGAVLAGNSLVCVSVATERALQTPTNSFIVSLAAADLLLALLVLPLFVYSEVQGGAWLLSPRLCDALMAMDVMLCTASIFNLCAISVDRFVAVAVPLRYNRQGGSRRQLLLIGATWLLSAAVAAPVLCGLNDVRGRDPAVCRLEDRDYVVYSSVCSFFLPCPLMLLLYWATFRGLQRWEVARRAKLHGRAPRRPSGPGPPSPTPPAPRLPQDPCGPDCAPPAPGLPRGPCGPDCAPAAPSLPQDPCGPDCAPPAPGLPPDPCGSNCAPPDAVRAAALPPQTPPQTRRRRRAKITGRERKAMRVLPVVVGAFLLCWTPFFVVHITQALCPACSVPPRLVSAVTWLGYVNSALNPVIYTVFNAEFRNVFRKALRACC

SEQ ID NO: 196 - protein, 479 aa, Homo sapiens
  source 1..479: note = sp|Q8N143|BCL6B_HUMAN B-cell CLL/lymphoma 6 member B protein OS=Homo sapiens OX=9606 GN=BCL6B PE=2 SV=2
MGSPAAPEGALGYVREFTRHSSDVLGNLNELRLRGILTDVTLLVGGQPLRAHKAVLIACSGFFYSIFRGRAGVGVDVLSLPGGPEARGFAPLLDFMYTSRLRLSPATAPAVLAAATYLQMEHVVQACHRFIQASYEPLGISLRPLEAEPPTPPTAPPPGSPRRSEGHPDPPTESRSCSQGPPSPASPDPKACNWKKYKYIVLNSQASQAGSLVGERSSGQPCPQARLPSGDEASSSSSSSSSSSEEGPIPGPQSRLSPTAATVQFKCGAPASTPYLLTSQAQDTSGSPSERARPLPGSEFFSCQNCEAVAGCSSGLDSLVPGDEDKPYKCQLCRSSFRYKGNLASHRTVHTGEKPYHCSICGARFNRPANLKTHSRIHSGEKPYKCETCGSRFVQVAHLRAHVLIHTGEKPYPCPTCGTRFRHLQTLKSHVRIHTGEKPYHCDPCGLHFRHKSQLRLHLRQKHGAATNTKVHYHILGGP

SEQ ID NO: 197 - protein, 730 aa, Homo sapiens
  source 1..730: note = sp|Q9H2J7|S6A15_HUMAN Sodium-dependent neutral amino acid transporter B(0)AT2 OS=Homo sapiens OX=9606; GN = SLC6A15 PE=1 SV=1
MPKNSKVVKRELDDDVTESVKDLLSNEDAADDAFKTSELIVDGQEEKDTDVEEGSEVEDERPAWNSKLQYILAQVGFSVGLGNVWRFPYLCQKNGGGAYLLPYLILLMVIGIPLFFLELSVGQRIRRGSIGVWNYISPKLGGIGFASCVVCYFVALYYNVIIGWSLFYFSQSFQQPLPWDQCPLVKNASHTFVEPECEQSSATTYYWYREALNISSSISESGGLNWKMTICLLAAWVMVCLAMIKGIQSSGKIIYFSSLFPYVVLICFLIRAFLLNGSIDGIRHMFTPKLEIMLEPKVWREAATQVFFALGLGFGGVIAFSSYNKRDNNCHFDAVLVSFINFFTSVLATLVVFAVLGFKANVINEKCITQNSETIMKFLKMGNISQDIIPHHINLSTVTAEDYHLVYDIIQKVKEEEFPALHLNSCKIEEELNKAVQGTGLAFIAFTEAMTHFPASPFWSVMFFLMLVNLGLGSMFGTIEGIVTPIVDTFKVRKEILTVICCLLAFCIGLIFVQRSGNYFVTMFDDYSATLPLLIVVILENIAVCFVYGIDKFMEDLKDMLGFAPSRYYYYMWKYISPLMLLSLLIASVVNMGLSPPGYNAWIEDKASEEFLSYPTWGLVVCVSLVVFAILPVPVVFIVRRFNLIDDSSGNLASVTYKRGRVLKEPVNLEGDDTSLIHGKIPSEMPSPNFGKNIYRKQSGSPTLDTAPNGRYGIGYLMADIMPDMPESDL

SEQ ID NO: 198 - protein, 324 aa, Homo sapiens
  source 1..324: note = sp|Q9NY26|S39A1_HUMAN Zinc transporter ZIP1 OS=Homo sapiens OX=9606 GN=SLC39A1 PE=1 SV=1
MGPWGEPELLVWRPEAVASEPPVPVGLEVKLGALVLLLVLTLLCSLVPICVLRRPGANHEGSASRQKALSLVSCFAGGVFLATCLLDLLPDYLAAIDEALAALHVTLQFPLQEFILAMGFFLVLVMEQITLAYKEQSGPSPLEETRALLGTVNGGPQHWHDGPGVPQASGAPATPSALRACVLVFSLALHSVFEGLAVGLQRDRARAMELCLALLLHKGILAVSLSLRLLQSHLRAQVVAGCGILFSCMTPLGIGLGAALAESAGPLHQLAQSVLEGMAAGTFLYITFLEILPQELASSEQRILKVILLLAGFALLTGLLFIQI

SEQ ID NO: 199 - protein, 875 aa, Homo sapiens
  source 1..875: note = sp|P56730|NETR_HUMAN Neurotrypsin OS=Homo sapiens; OX = 9606 GN=PRSS12 PE=2 SV=2
MTLARFVLALMLGALPEVVGFDSVLNDSLHHSHRHSPPAGPHYPYYLPTQQRPPRTRPPPPLPRFPRPPRALPAQRPHALQAGHTPRPHPWGCPAGEPWVSVTDFGAPCLRWAEVPPFLERSPPASWAQLRGQRHNFCRSPDGAGRPWCFYGDARGKVDWGYCDCRHGSVRLRGGKNEFEGTVEVYASGVWGTVCSSHWDDSDASVICHQLQLGGKGIAKQTPFSGLGLIPIYWSNVRCRGDEENILLCEKDIWQGGVCPQKMAAAVTCSFSHGPTFPIIRLAGGSSVHEGRVELYHAGQWGTVCDDQWDDADAEVICRQLGLSGIAKAWHQAYFGEGSGPVMLDEVRCTGNELSIEQCPKSSWGEHNCGHKEDAGVSCTPLTDGVIRLAGGKGSHEGRLEVYYRGQWGTVCDDGWTELNTYVVCRQLGFKYGKQASANHFEESTGPIWLDDVSCSGKETRFLQCSRRQWGRHDCSHREDVSIACYPGGEGHRLSLGFPVRLMDGENKKEGRVEVFINGQWGTICDDGWTDKDAAVICRQLGYKGPARARTMAYFGEGKGPIHVDNVKCTGNERSLADCIKQDIGRHNCRHSEDAGVICDYFGKKASGNSNKESLSSVCGLRLLHRRQKRIIGGKNSLRGGWPWQVSLRLKSSHGDGRLLCGATLLSSCWVLTAAHCFKRYGNSTRSYAVRVGDYHTLVPEEFEEEIGVQQIVIHREYRPDRSDYDIALVRLQGPEEQCARFSSHVLPACLPLWRERPQKTASNCYITGWGDTGRAYSRTLQQAAIPLLPKRFCEERYKGRFTGRMLCAGNLHEHKRVDSCQGDSGGPLMCERPGESWVVYGVTSWGYGCGVKDSPGVYTKVSAFVPWIKSVTKL

SEQ ID NO: 200 - protein, 236 aa, Homo sapiens
  source 1..236: note = sp|P41238|ABEC1_HUMAN C->U-editing enzyme APOBEC-1; OS = Homo sapiens OX=9606 GN=APOBEC1 PE=1 SV=3
MTSEKGPSTGDPTLRRRIEPWEFDVFYDPRELRKEACLLYEIKWGMSRKIWRSSGKNTTNHVEVNFIKKFTSERDFHPSMSCSITWFLSWSPCWECSQAIREFLSRHPGVTLVIYVARLFWHMDQQNRQGLRDLVNSGVTIQIMRASEYYHCWRNFVNYPPGDEAHWPQYPPLWMMLYALELHCIILSLPPCLKISRRWQNHLTFFRLHLQNCHYQTIPPHILLATGLIHPSVAWR

SEQ ID NO: 201 - protein, 652 aa, Homo sapiens
  source 1..652: note = sp|Q66K79|CBPZ_HUMAN Carboxypeptidase Z OS=Homo sapiens OX=9606 GN=CPZ PE=1 SV=2
MPPPLPLLLLTVLVVAAARPGCEFERNPAGECHRPPAADSATCVDLQLRTCSDAAYNHTTFPNLLQHRSWEVVEASSEYILLSVLHQLLEGQCNPDLRLLGCAVLAPRCEGGWVRRPCRHICEGLREVCQPAFDAIDMAWPYFLDCHRYFTREDEGCYDPLEKLRGGLEADEALPSGLPPTFIRFSHHSYAQMVRVLRRTASRCAHVARTYSIGRSFDGRELLVIEFSSRPGQHELMEPEVKLIGNIHGNEVAGREMLIYLAQYLCSEYLLGNPRIQRLLNTTRIHLLPSMNPDGYEVAAAEGAGYNGWTSGRQNAQNLDLNRNFPDLTSEYYRLAETRGARSDHIPIPQHYWWGKVAPETKAIMKWMQTIPFVLSASLHGGDLVVSYPFDFSKHPQEEKMFSPTPDEKMFKLLSRAYADVHPMMMDRSENRCGGNFLKRGSIINGADWYSFTGGMSDFNYLHTNCFEITVELGCVKFPPEEALYILWQHNKESLLNFVETVHRGIKGVVTDKFGKPVKNARISVKGIRHDITTAPDGDYWRLLPPGIHIVIAQAPGYAKVIKKVIIPARMKRAGRVDFILQPLGMGPKNFIHGLRRTGPHDPLGGASSLGEATEPDPLRARRQPSADGSKPWWWSYFTSLSTHRPRWLLKY

SEQ ID NO: 202 - protein, 385 aa, Homo sapiens
  source 1..385: note = sp|Q9Y466|NR2E1_HUMAN Nuclear receptor subfamily 2 group E member 1 OS=Homo sapiens OX=9606 GN=NR2E1 PE=1 SV=1
MSKPAGSTSRILDIPCKVCGDRSSGKHYGVYACDGCSGFFKRSIRRNRTYVCKSGNQGGCPVDKTHRNQCRACRLKKCLEVNMNKDAVQHERGPRTSTIRKQVALYFRGHKEENGAAAHFPSAALPAPAFFTAVTQLEPHGLELAAVSTTPERQTLVSLAQPTPKYPHEVNGTPMYLYEVATESVCESAARLLFMSIKWAKSVPAFSTLSLQDQLMLLEDAWRELFVLGIAQWAIPVDANTLLAVSGMNGDNTDSQKLNKIISEIQALQEVVARFRQLRLDATEFACLKCIVTFKAVPTHSGSELRSFRNAAAIAALQDEAQLTLNSYIHTRYPTQPCRFGKLLLLLPALRSISPSTIEEVFFKKTIGNVPITRLLSDMYKSSDI

SEQ ID NO: 203 - protein, 623 aa, Homo sapiens
  source 1..623: note = sp|P20794|MAK_HUMAN Serine/threonine-protein kinase MAK OS=Homo sapiens OX=9606 GN=MAK PE=1 SV=2
MNRYTTMRQLGDGTYGSVLMGKSNESGELVAIKRMKRKFYSWDECMNLREVKSLKKLNHANVIKLKEVIRENDHLYFIFEYMKENLYQLMKDRNKLFPESVIRNIMYQILQGLAFIHKHGFFHRDMKPENLLCMGPELVKIADFGLARELRSQPPYTDYVSTRWYRAPEVLLRSSVYSSPIDVWAVGSIMAELYMLRPLFPGTSEVDEIFKICQVLGTPKKSDWPEGYQLASSMNFRFPQCVPINLKTLIPNASNEAIQLMTEMLNWDPKKRPTASQALKHPYFQVGQVLGPSSNHLESKQSLNKQLQPLESKPSLVEVEPKPLPDIIDQVVGQPQPKTSQQPLQPIQPPQNLSVQQPPKQQSQEKPPQTLFPSIVKNMPTKPNGTLSHKSGRRRWGQTIFKSGDSWEELEDYDFGASHSKKPSMGVFKEKRKKDSPFRLPEPVPSGSNHSTGENKSLPAVTSLKSDSELSTAPTSKQYYLKQSRYLPGVNPKKVSLIASGKEINPHTWSNQLFPKSLGPVGAELAFKRSNAGNLGSYATYNQSGYIPSFLKKEVQSAGQRIHLAPLNATASEYTWNTKTGRGQFSGRTYNPTAKNLNIVNRAQPIPSVHGRTDWVAKYGGHR

SEQ ID NO: 204 - protein, 1030 aa, Homo sapiens
  source 1..1030: note = sp|Q96T76|MMS19_HUMAN MMS19 nucleotide excision repair protein homolog OS=Homo sapiens OX=9606 GN=MMS19; PE = 1 SV=2
MAAAAAVEAAAPMGALWGLVHDFVVGQQEGPADQVAADVKSGNYTVLQVVEALGSSLENPEPRTRARAIQLLSQVLLHCHTLLLEKEVVHLILFYENRLKDHHLVIPSVLQGLKALSLCVALPPGLAVSVLKAIFQEVHVQSLPQVDRHTVYNIITNFMRTREEELKSLGADFTFGFIQVMDGEKDPRNLLVAFRIVHDLISRDYSLGPFVEELFEVTSCYFPIDFTPPPNDPHGIQREDLILSLRAVLASTPRFAEFLLPLLIEKVDSEVLSAKLDSLQTLNACCAVYGQKELKDFLPSLWASIRREVFQTASERVEAEGLAALHSLTACLSRSVLRADAEDLLDSFLSNILQDCRHHLCEPDMKLVWPSAKLLQAAAGASARACDSVTSNVLPLLLEQFHKHSQSSQRRTILEMLLGFLKLQQKWSYEDKDQRPLNGFKDQLCSLVFMALTDPSTQLQLVGIRTLTVLGAQPDLLSYEDLELAVGHLYRLSFLKEDSQSCRVAALEASGTLAALYPVAFSSHLVPKLAEELRVGESNLTNGDEPTQCSRHLCCLQALSAVSTHPSIVKETLPLLLQHLWQVNRGNMVAQSSDVIAVCQSLRQMAEKCQQDPESCWYFHQTAIPCLLALAVQASMPEKEPSVLRKVLLEDEVLAAMVSVIGTATTHLSPELAAQSVTHIVPLFLDGNVSFLPENSFPSRFQPFQDGSSGQRRLIALLMAFVCSLPRNVEIPQLNQLMRELLELSCCHSCPFSSTAAAKCFAGLLNKHPAGQQLDEFLQLAVDKVEAGLGSGPCRSQAFTLLLWVTKALVLRYHPLSSCLTARLMGLLSDPELGPAAADGFSLLMSDCTDVLTRAGHAEVRIMFRQRFFTDNVPALVQGFHAAPQDVKPNYLKGLSHVLNRLPKPVLLPELPTLLSLLLEALSCPDCVVQLSTLSCLQPLLLEAPQVMSLHVDTLVTKFLNLSSSPSMAVRIAALQCMHALTRLPTPVLLPYKPQVIRALAKPLDDKKRLVRKEAVSARGEWFLLGSPGS

SEQ ID NO: 205 - protein, 573 aa, Homo sapiens
  source 1..573: note = sp|Q99504|EYA3_HUMAN Eyes absent homolog 3 OS=Homo sapiens OX=9606 GN=EYA3 PE=1 SV=3
MEEEQDLPEQPVKKAKMQESGEQTISQVSNPDVSDQKPETSSLASNLPMSEEIMTCTDYIPRSSNDYTSQMYSAKPYAHILSVPVSETAYPGQTQYQTLQQTQPYAVYPQATQTYGLPPFGALWPGMKPESGLIQTPSPSQHSVLTCTTGLTTSQPSPAHYSYPIQASSTNASLISTSSTIANIPAAAVASISNQDYPTYTILGQNQYQACYPSSSFGVTGQTNSDAESTTLAATTYQSEKPSVMAPAPAAQRLSSGDPSTSPSLSQTTPSKDTDDQSRKNMTSKNRGKRKADATSSQDSELERVFLWDLDETIIIFHSLLTGSYAQKYGKDPTVVIGSGLTMEEMIFEVADTHLFFNDLEECDQVHVEDVASDDNGQDLSNYSFSTDGFSGSGGSGSHGSSVGVQGGVDWMRKLAFRYRKVREIYDKHKSNVGGLLSPQRKEALQRLRAEIEVLTDSWLGTALKSLLLIQSRKNCVNVLITTTQLVPALAKVLLYGLGEIFPIENIYSATKIGKESCFERIVSRFGKKVTYVVIGDGRDEEIAAKQHNMPFWRITNHGDLVSLHQALELDFL

SEQ ID NO: 206 - protein, 392 aa, Homo sapiens
  source 1..392: note = sp|Q99487|PAFA2_HUMAN Platelet-activating factor acetylhydrolase 2, cytoplasmic OS=Homo sapiens OX=9606; GN = PAFAH2 PE=1 SV=1
MGVNQSVGFPPVTGPHLVGCGDVMEGQNLQGSFFRLFYPCQKAEETMEQPLWIPRYEYCTGLAEYLQFNKRCGGLLFNLAVGSCRLPVSWNGPFKTKDSGYPLIIFSHGLGAFRTLYSAFCMELASRGFVVAVPEHRDRSAATTYFCKQAPEENQPTNESLQEEWIPFRRVEEGEKEFHVRNPQVHQRVSECLRVLKILQEVTAGQTVFNILPGGLDLMTLKGNIDMSRVAVMGHSFGGATAILALAKETQFRCAVALDAWMFPLERDFYPKARGPVFFINTEKFQTMESVNLMKKICAQHEQSRIITVLGSVHRSQTDFAFVTGNLIGKFFSTETRGSLDPYEGQEVMVRAMLAFLQKHLDLKEDYNQWNNLIEGIGPSLTPGAPHHLSSL

SEQ ID NO: 207 - protein, 430 aa, Homo sapiens
  source 1..430: note = sp|Q9UIF3|TEKT2_HUMAN Tektin-2 OS=Homo sapiens; OX = 9606 GN=TEKT2 PE=1 SV=1
MATLSVKPSRRFQLPDWHTNSYLLSTNAQLQRDASHQIRQEARVLRNETNNQTIWDEHDNRTRLVERIDTVNRWKEMLDKCLTDLDAEIDALTQMKESAEQNLQAKNLPLDVAIECLTLRESRRDIDVVKDPVEDELHKEVEVIEATKKALQQKVSQAFEQLCLLQEVQQQLNSDHRGKMETLEIDRGCLSLNLRSPNISLKVDPTRVPDGSTTLQQWDDFSRFNKDRAEAEMKAATELREATALTIAETNNELEAQRVATEFAFRKRLREMEKVYSELKWQEKNTLEEIAELQEDIRHLEEDLRTKLLSLKLSHTRLEARTYRPNVELCRDQAQYGLTDEVHQLEATIAALKQKLAQAQDALDALCKHLARLQADIACKANSMLLDTKCMDTRRKLTVPAERFVPEVDTFTRTTNSTLSPLKSCQLELA

SEQ ID NO: 208 - protein, 445 aa, Homo sapiens
  source 1..445: note = sp|P26572|MGAT1_HUMAN Alpha-1,3-mannosyl-glycoprotein 2-beta-N-acetylglucosaminyltransferase OS=Homo sapiens; OX = 9606 GN=MGAT1 PE=1 SV=2
MLKKQSAGLVLWGAILFVAWNALLLLFFWTRPAPGRPPSVSALDGDPASLTREVIRLAQDAEVELERQRGLLQQIGDALSSQRGRVPTAAPPAQPRVPVTPAPAVIPILVIACDRSTVRRCLDKLLHYRPSAELFPIIVSQDCGHEETAQAIASYGSAVTHIRQPDLSSIAVPPDHRKFQGYYKIARHYRWALGQVFRQFRFPAAVVVEDDLEVAPDFFEYFRATYPLLKADPSLWCVSAWNDNGKEQMVDASRPELLYRTDFFPGLGWLLLAELWAELEPKWPKAFWDDWMRRPEQRQGRACIRPEISRTMTFGRKGVSHGQFFDQHLKFIKLNQQFVHFTQLDLSYLQREAYDRDFLARVYGAPQLQVEKVRTNDRKELGEVRVQYTGRDSFKAFAKALGVMDDLKSGVPRAGYRGIVTFQFRGRRVHLAPPLTWEGYDPSWN

SEQ ID NO: 209 - protein, 794 aa, Homo sapiens
  source 1..794: note = sp|Q96CN4|EVI5L_HUMAN EVI5-like protein OS=Homo sapiens OX=9606 GN=EVI5L PE=1 SV=1
MASPTLSPDSSSQEALSAPTCSPTSDSENLSPDELELLAKLEEQNRLLEADSKSMRSMNGSRRNSGSSLVSSSSASSNLSHLEEDTWILWGRIANEWEEWRRRKEKLLKELIRKGIPHHFRAIVWQLLCSATDMPVKNQYSELLKMSSPCEKLIRRDIARTYPEHEFFKGQDSLGQEVLFNVMKAYSLVDREVGYCQGSAFIVGLLLMQMPEEEAFCVFVRLMQEYRLRELFKPSMAELGLCIYQFEYMLQEQLPDLNTHFRSQSFHTSMYASSWFLTLFLTTFPLPVATRVFDIFMYEGLEIVFRVGLALLQVNQAELMQLDMEGMSQYFQRVIPHQFDSCPDKLVLKAYQVKYNPKKMKRLEKEYAAMKSKEMEEQIEIKRLRTENRLLKQRIETLEKGQVTRAQEAEENYVIKRELAVVRQQCSSAAEDLQKAQSTIRQLQEQQENPRLTEDFVSHLETELEQSRLRETETLGALREMQDKVLDMEKRNSSLPDENNVAQLQEELKALKVREGQAVASTRELKLQLQELSDTWQAHLARGGRWKESPRKLVVGELQDELMSVRLREAQALAEGRELRQRVVELETQDHIHRNLLNRVEAERAALQEKLQYLAAQNKGLQTQLSESRRKQAEAECKSKEEVMAVRLREADSMAAVAEMRQRIAELEIQREEGRIQGQLNHSDSSQYIRELKDQIEELKAEVRLLKGPPPFEDPLAFDGLSLARHLDEDSLPSSDEELLGVGVGAALQDALYPLSPRDARFFRRLERPAKDSEGSSDSDADELAAPYSQGLDN

SEQ ID NO: 210 - protein, 226 aa, Homo sapiens
  source 1..226: note = sp|P29033|CXB2_HUMAN Gap junction beta-2 protein; OS = Homo sapiens OX=9606 GN=GJB2 PE=1 SV=3
MDWGTLQTILGGVNKHSTSIGKIWLTVLFIFRIMILVVAAKEVWGDEQADFVCNTLQPGCKNVCYDHYFPISHIRLWALQLIFVSTPALLVAMHVAYRRHEKKRKFIKGEIKSEFKDIEEIKTQKVRIEGSLWWTYTSSIFFRVIFEAAFMYVFYVMYDGFSMQRLVKCNAWPCPNTVDCFVSRPTEKTVFTVFMIAVSGICILLNVTELCYLLIRYCSGKSKKPV

SEQ ID NO: 211 - protein, 2221 aa, Homo sapiens
  source 1..2221: note = sp|Q13936|CAC1C_HUMAN Voltage-dependent L-type calcium channel subunit alpha-1C OS=Homo sapiens OX=9606; GN = CACNA1C PE=1 SV=4
MVNENTRMYIPEENHQGSNYGSPRPAHANMNANAAAGLAPEHIPTPGAALSWQAAIDAARQAKLMGSAGNATISTVSSTQRKRQQYGKPKKQGSTTATRPPRALLCLTLKNPIRRACISIVEWKPFEIIILLTIFANCVALAIYIPFPEDDSNATNSNLERVEYLFLIIFTVEAFLKVIAYGLLFHPNAYLRNGWNLLDFIIVVVGLFSAILEQATKADGANALGGKGAGFDVKALRAFRVLRPLRLVSGVPSLQVVLNSIIKAMVPLLHIALLVLFVIIIYAIIGLELFMGKMHKTCYNQEGIADVPAEDDPSPCALETGHGRQCQNGTVCKPGWDGPKHGITNFDNFAFAMLTVFQCITMEGWTDVLYWVNDAVGRDWPWIYFVTLIIIGSFFVLNLVLGVLSGEFSKEREKAKARGDFQKLREKQQLEEDLKGYLDWITQAEDIDPENEDEGMDEEKPRNMSMPTSETESVNTENVAGGDIEGENCGARLAHRISKSKFSRYWRRWNRFCRRKCRAAVKSNVFYWLVIFLVFLNTLTIASEHYNQPNWLTEVQDTANKALLALFTAEMLLKMYSLGLQAYFVSLFNRFDCFVVCGGILETILVETKIMSPLGISVLRCVRLLRIFKITRYWNSLSNLVASLLNSVRSIASLLLLLFLFIIIFSLLGMQLFGGKFNFDEMQTRRSTFDNFPQSLLTVFQILTGEDWNSVMYDGIMAYGGPSFPGMLVCIYFIILFICGNYILLNVFLAIAVDNLADAESLTSAQKEEEEEKERKKLARTASPEKKQELVEKPAVGESKEEKIELKSITADGESPPATKINMDDLQPNENEDKSPYPNPETTGEEDEEEPEMPVGPRPRPLSELHLKEKAVPMPEASAFFIFSSNNRFRLQCHRIVNDTIFTNLILFFILLSSISLAAEDPVQHTSFRNHILFYFDIVFTTIFTIEIALKILGNADYVFTSIFTLEIILKMTAYGAFLHKGSFCRNYFNILDLLVVSVSLISFGIQSSAINVVKILRVLRVLRPLRAINRAKGLKHVVQCVFVAIRTIGNIVIVTTLLQFMFACIGVQLFKGKLYTCSDSSKQTEAECKGNYITYKDGEVDHPIIQPRSWENSKFDFDNVLAAMMALFTVSTFEGWPELLYRSIDSHTEDKGPIYNYRVEISIFFIIYIIIIAFFMMNIFVGFVIVTFQEQGEQEYKNCELDKNQRQCVEYALKARPLRRYIPKNQHQYKVWYVVNSTYFEYLMFVLILLNTICLAMQHYGQSCLFKIAMNILNMLFTGLFTVEMILKLIAFKPKGYFSDPWNVFDFLIVIGSIIDVILSETNHYFCDAWNTFDALIVVGSIVDIAITEVNPAEHTQCSPSMNAEENSRISITFFRLFRVMRLVKLLSRGEGIRTLLWTFIKSFQALPYVALLIVMLFFIYAVIGMQVFGKIALNDTTEINRNNNFQTFPQAVLLLFRCATGEAWQDIMLACMPGKKCAPESEPSNSTEGETPCGSSFAVFYFISFYMLCAFLIINLFVAVIMDNFDYLTRDWSILGPHHLDEFKRIWAEYDPEAKGRIKHLDVVTLLRRIQPPLGFGKLCPHRVACKRLVSMNMPLNSDGTVMFNATLFALVRTALRIKTEGNLEQANEELRAIIKKIWKRTSMKLLDQVVPPAGDDEVTVGKFYATFLIQEYFRKFKKRKEQGLVGKPSQRNALSLQAGLRTLHDIGPEIRRAISGDLTAEEELDKAMKEAVSAASEDDIFRRAGGLFGNHVSYYQSDGRSAFPQTFTTQRPLHINKAGSSQGDTESPSHEKLVDSTFTPSSYSSTGSNANINNANNTALGRLPRPAGYPSTVSTVEGHGPPLSPAIRVQEVAWKLSSNRERHVPMCEDLELRRDSGSAGTQAHCLLLRKANPSRCHSRESQAAMAGQEETSQDETYEVKMNHDTEACSEPSLLSTEMLSYQDDENRQLTLPEEDKRDIRQSPKRGFLRSASLGRRASFHLECLKRQKDRGGDISQKTVLPLHLVHHQALAVAGLSPLLQRSHSPASFPRPFATPPATPGSRGWPPQPVPTLRLEGVESSEKLNSSFPSIHCGSWAETTPGGGGSSAARRVRPVSLMVPSQAGAPGRQFHGSASSLVEAVLISEGLGQFAQDPKFIEVTTQELADACDMTIEEMESAADNILSGGAPQSPNGALLPFVNCRDAGQDRAGGEEDAGCVRARGRPSEEELQDSRVYVSSL

SEQ ID NO: 212 - protein, 945 aa, Homo sapiens
  source 1..945: note = sp|Q8IZJ1|UNC5B_HUMAN Netrin receptor UNC5B OS=Homo sapiens OX=9606 GN=UNC5B PE=1 SV=2
MGARSGARGALLLALLLCWDPRLSQAGTDSGSEVLPDSFPSAPAEPLPYFLQEPQDAYIVKNKPVELRCRAFPATQIYFKCNGEWVSQNDHVTQEGLDEATGLRVREVQIEVSRQQVEELFGLEDYWCQCVAWSSAGTTKSRRAYVRIAYLRKNFDQEPLGKEVPLDHEVLLQCRPPEGVPVAEVEWLKNEDVIDPTQDTNFLLTIDHNLIIRQARLSDTANYTCVAKNIVAKRRSTTATVIVYVNGGWSSWAEWSPCSNRCGRGWQKRTRTCTNPAPLNGGAFCEGQAFQKTACTTICPVDGAWTEWSKWSACSTECAHWRSRECMAPPPQNGGRDCSGTLLDSKNCTDGLCMQNKKTLSDPNSHLLEASGDAALYAGLVVAIFVVVAILMAVGVVVYRRNCRDFDTDITDSSAALTGGFHPVNFKTARPSNPQLLHPSVPPDLTASAGIYRGPVYALQDSTDKIPMTNSPLLDPLPSLKVKVYSSSTTGSGPGLADGADLLGVLPPGTYPSDFARDTHFLHLRSASLGSQQLLGLPRDPGSSVSGTFGCLGGRLSIPGTGVSLLVPNGAIPQGKFYEMYLLINKAESTLPLSEGTQTVLSPSVTCGPTGLLLCRPVILTMPHCAEVSARDWIFQLKTQAHQGHWEEVVTLDEETLNTPCYCQLEPRACHILLDQLGTYVFTGESYSRSAVKRLQLAVFAPALCTSLEYSLRVYCLEDTPVALKEVLELERTLGGYLVEEPKPLMFKDSYHNLRLSLHDLPHAHWRSKLLAKYQEIPFYHIWSGSQKALHCTFTLERHSLASTELTCKICVRQVEGEGQIFQLHTTLAETPAGSLDTLCSAPGSTVTTQLGPYAFKIPLSIRQKICNSLDAPNSRGNDWRMLAQKLSMDRYLNYFATKASPTGVILDLWEALQQDDGDLNSLASALEEMGKSEMLVAVATDGDC

SEQ ID NO: 213 - protein, 338 aa, Homo sapiens
  source 1..338: note = sp|Q9NYZ2|MFRN1_HUMAN Mitoferrin-1 OS=Homo sapiens; OX = 9606 GN=SLC25A37 PE=1 SV=2
MELRSGSVGSQAVARRMDGDSRDGGGGKDATGSEDYENLPTSASVSTHMTAGAMAGILEHSVMYPVDSVKTRMQSLSPDPKAQYTSIYGALKKIMRTEGFWRPLRGVNVMIMGAGPAHAMYFACYENMKRTLNDVFHHQGNSHLANGIAGSMATLLHDAVMNPAEVVKQRLQMYNSQHRSAISCIRTVWRTEGLGAFYRSYTTQLTMNIPFQSIHFITYEFLQEQVNPHRTYNPQSHIISGGLAGALAAAATTPLDVCKTLLNTQENVALSLANISGRLSGMANAFRTVYQLNGLAGYFKGIQARVIYQMPSTAISWSVYEFFKYFLTKRQLENRAPY

SEQ ID NO: 214 - protein, 216 aa, Homo sapiens
  source 1..216: note = sp|Q86TA1|MOB3B_HUMAN MOB kinase activator 3B; OS = Homo sapiens OX=9606 GN=MOB3B PE=1 SV=2
MSIALKQVFNKDKTFRPKRKFEPGTQRFELHKRAQASLNSGVDLKAAVQLPSGEDQNDWVAVHVVDFFNRINLIYGTICEFCTERTCPVMSGGPKYEYRWQDDLKYKKPTALPAPQYMNLLMDWIEVQINNEEIFPTCVGVPFPKNFLQICKKILCRLFRVFVHVYIHHFDRVIVMGAEAHVNTCYKHFYYFVTEMNLIDRKELEPLKEMTSRMCH

SEQ ID NO: 215 - protein, 1337 aa, Homo sapiens
  source 1..1337: note = sp|Q12913|PTPRJ_HUMAN Receptor-type tyrosine-protein phosphatase eta OS=Homo sapiens OX=9606 GN=PTPRJ PE=1 SV=3
MKPAAREARLPPRSPGLRWALPLLLLLLRLGQILCAGGTPSPIPDPSVATVATGENGITQISSTAESFHKQNGTGTPQVETNTSEDGESSGANDSLRTPEQGSNGTDGASQKTPSSTGPSPVFDIKAVSISPTNVILTWKSNDTAASEYKYVVKHKMENEKTITVVHQPWCNITGLRPATSYVFSITPGIGNETWGDPRVIKVITEPIPVSDLRVALTGVRKAALSWSNGNGTASCRVLLESIGSHEELTQDSRLQVNISGLKPGVQYNINPYLLQSNKTKGDPLGTEGGLDASNTERSRAGSPTAPVHDESLVGPVDPSSGQQSRDTEVLLVGLEPGTRYNATVYSQAANGTEGQPQAIEFRTNAIQVFDVTAVNISATSLTLIWKVSDNESSSNYTYKIHVAGETDSSNLNVSEPRAVIPGLRSSTFYNITVCPVLGDIEGTPGFLQVHTPPVPVSDFRVTVVSTTEIGLAWSSHDAESFQMHITQEGAGNSRVEITTNQSIIIGGLFPGTKYCFEIVPKGPNGTEGASRTVCNRTVPSAVFDIHVVYVTTTEMWLDWKSPDGASEYVYHLVIESKHGSNHTSTYDKAITLQGLIPGTLYNITISPEVDHVWGDPNSTAQYTRPSNVSNIDVSTNTTAATLSWQNFDDASPTYSYCLLIEKAGNSSNATQVVTDIGITDATVTELIPGSSYTVEIFAQVGDGIKSLEPGRKSFCTDPASMASFDCEVVPKEPALVLKWTCPPGANAGFELEVSSGAWNNATHLESCSSENGTEYRTEVTYLNFSTSYNISITTVSCGKMAAPTRNTCTTGITDPPPPDGSPNITSVSHNSVKVKFSGFEASHGPIKAYAVILTTGEAGHPSADVLKYTYEDFKKGASDTYVTYLIRTEEKGRSQSLSEVLKYEIDVGNESTTLGYYNGKLEPLGSYRACVAGFTNITFHPQNKGLIDGAESYVSFSRYSDAVSLPQDPGVICGAVFGCIFGALVIVTVGGFIFWRKKRKDAKNNEVSFSQIKPKKSKLIRVENFEAYFKKQQADSNCGFAEEYEDLKLVGISQPKYAAELAENRGKNRYNNVLPYDISRVKLSVQTHSTDDYINANYMPGYHSKKDFIATQGPLPNTLKDFWRMVWEKNVYAIIMLTKCVEQGRTKCEEYWPSKQAQDYGDITVAMTSEIVLPEWTIRDFTVKNIQTSESHPLRQFHFTSWPDHGVPDTTDLLINFRYLVRDYMKQSPPESPILVHCSAGVGRTGTFIAIDRLIYQIENENTVDVYGIVYDLRMHRPLMVQTEDQYVFLNQCVLDIVRSQKDSKVDLIYQNTTAMTIYENLAPVTTFGKTNGYIA

SEQ ID NO: 216 - protein, 2224 aa, Homo sapiens
  source 1..2224: note = sp|P12259|FA5_HUMAN Coagulation factor V OS=Homo sapiens OX=9606 GN=F5 PE=1 SV=4
MFPGCPRLWVLVVLGTSWVGWGSQGTEAAQLRQFYVAAQGISWSYRPEPTNSSLNLSVTSFKKIVYREYEPYFKKEKPQSTISGLLGPTLYAEVGDIIKVHFKNKADKPLSIHPQGIRYSKLSEGASYLDHTFPAEKMDDAVAPGREYTYEWSISEDSGPTHDDPPCLTHIYYSHENLIEDFNSGLIGPLLICKKGTLTEGGTQKTFDKQIVLLFAVFDESKSWSQSSSLMYTVNGYVNGTMPDITVCAHDHISWHLLGMSSGPELFSIHFNGQVLEQNHHKVSAITLVSATSTTANMTVGPEGKWIISSLTPKHLQAGMQAYIDIKNCPKKTRNLKKITREQRRHMKRWEYFIAAEEVIWDYAPVIPANMDKKYRSQHLDNFSNQIGKHYKKVMYTQYEDESFTKHTVNPNMKEDGILGPIIRAQVRDTLKIVFKNMASRPYSIYPHGVTFSPYEDEVNSSFTSGRNNTMIRAVQPGETYTYKWNILEFDEPTENDAQCLTRPYYSDVDIMRDIASGLIGLLLICKSRSLDRRGIQRAADIEQQAVFAVFDENKSWYLEDNINKFCENPDEVKRDDPKFYESNIMSTINGYVPESITTLGFCFDDTVQWHFCSVGTQNEILTIHFTGHSFIYGKRHEDTLTLFPMRGESVTVTMDNVGTWMLTSMNSSPRSKKLRLKFRDVKCIPDDDEDSYEIFEPPESTVMATRKMHDRLEPEDEESDADYDYQNRLAAALGIRSFRNSSLNQEEEEFNLTALALENGTEFVSSNTDIIVGSNYSSPSNISKFTVNNLAEPQKAPSHQQATTAGSPLRHLIGKNSVLNSSTAEHSSPYSEDPIEDPLQPDVTGIRLLSLGAGEFKSQEHAKHKGPKVERDQAAKHRFSWMKLLAHKVGRHLSQDTGSPSGMRPWEDLPSQDTGSPSRMRPWKDPPSDLLLLKQSNSSKILVGRWHLASEKGSYEIIQDTDEDTAVNNWLISPQNASRAWGESTPLANKPGKQSGHPKFPRVRHKSLQVRQDGGKSRLKKSQFLIKTRKKKKEKHTHHAPLSPRTFHPLRSEAYNTFSERRLKHSLVLHKSNETSLPTDLNQTLPSMDFGWIASLPDHNQNSSNDTGQASCPPGLYQTVPPEEHYQTFPIQDPDQMHSTSDPSHRSSSPELSEMLEYDRSHKSFPTDISQMSPSSEHEVWQTVISPDLSQVTLSPELSQTNLSPDLSHTTLSPELIQRNLSPALGQMPISPDLSHTTLSPDLSHTTLSLDLSQTNLSPELSQTNLSPALGQMPLSPDLSHTTLSLDFSQTNLSPELSHMTLSPELSQTNLSPALGQMPISPDLSHTTLSLDFSQTNLSPELSQTNLSPALGQMPLSPDPSHTTLSLDLSQTNLSPELSQTNLSPDLSEMPLFADLSQIPLTPDLDQMTLSPDLGETDLSPNFGQMSLSPDLSQVTLSPDISDTTLLPDLSQISPPPDLDQIFYPSESSQSLLLQEFNESFPYPDLGQMPSPSSPTLNDTFLSKEFNPLVIVGLSKDGTDYIEIIPKEEVQSSEDDYAEIDYVPYDDPYKTDVRTNINSSRDPDNIAAWYLRSNNGNRRNYYIAAEEISWDYSEFVQRETDIEDSDDIPEDTTYKKVVFRKYLDSTFTKRDPRGEYEEHLGILGPIIRAEVDDVIQVRFKNLASRPYSLHAHGLSYEKSSEGKTYEDDSPEWFKEDNAVQPNSSYTYVWHATERSGPESPGSACRAWAYYSAVNPEKDIHSGLIGPLLICQKGILHKDSNMPMDMREFVLLFMTFDEKKSWYYEKKSRSSWRLTSSEMKKSHEFHAINGMIYSLPGLKMYEQEWVRLHLLNIGGSQDIHVVHFHGQTLLENGNKQHQLGVWPLLPGSFKTLEMKASKPGWWLLNTEVGENQRAGMQTPFLIMDRDCRMPMGLSTGIISDSQIKASEFLGYWEPRLARLNNGGSYNAWSVEKLAAEFASKPWIQVDMQKEVIITGIQTQGAKHYLKSCYTTEFYVAYSSNQINWQIFKGNSTRNVMYFNGNSDASTIKENQFDPPIVARYIRISPTRAYNRPTLRLELQGCEVNGCSTPLGMENGKIENKQITASSFKKSWWGDYWEPFRARLNAQGRVNAWQAKANNNKQWLEIDLLKIKKITAIITQGCKSLSSEMYVKSYTIHYSEQGVEWKPYRLKSSMVDKIFEGNTNTKGHVKNFFNPPIISRFIRVIPKTWNQSIALRLELFGCDIY

SEQ ID NO: 217 - protein, 551 aa, Homo sapiens
  source 1..551: note = sp|Q04206|TF65_HUMAN Transcription factor p65; OS = Homo sapiens OX=9606 GN=RELA PE=1 SV=2
MDELFPLIFPAEPAQASGPYVEIIEQPKQRGMRFRYKCEGRSAGSIPGERSTDTTKTHPTIKINGYTGPGTVRISLVTKDPPHRPHPHELVGKDCRDGFYEAELCPDRCIHSFQNLGIQCVKKRDLEQAISQRIQTNNNPFQVPIEEQRGDYDLNAVRLCFQVTVRDPSGRPLRLPPVLSHPIFDNRAPNTAELKICRVNRNSGSCLGGDEIFLLCDKVQKEDIEVYFTGPGWEARGSFSQADVHRQVAIVFRTPPYADPSLQAPVRVSMQLRRPSDRELSEPMEFQYLPDTDDRHRIEEKRKRTYETFKSIMKKSPFSGPTDPRPPPRRIAVPSRSSASVPKPAPQPYPFTSSLSTINYDEFPTMVFPSGQISQASALAPAPPQVLPQAPAPAPAPAMVSALAQAPAPVPVLAPGPPQAVAPPAPKPTQAGEGTLSEALLQLQFDDEDLGALLGNSTDPAVFTDLASVDNSEFQQLLNQGIPVAPHTTEPMLMEYPEAITRLVTGAQRPPDPAPAPLGAPGLPNGLLSGDEDFSSIADMDFSALLSQISS

SEQ ID NO: 218 - protein, 1430 aa, Homo sapiens
  source 1..1430: note = sp|Q6ZV73|FGD6_HUMAN FYVE, RhoGEF and PH domain-containing protein 6 OS=Homo sapiens OX=9606; GN = FGD6 PE=1 SV=2
MTSAAEIKKPPVAPKPKFVVANNKPAPPPIAPKPDIVISSVPQSTKKMKPAIAPKPKVLKTSPVREIGQSPSRKIMLNLEGHKQELAESTDNFNCKYEGNQSNDYISPMCSCSSECIHKLGHRENLCVKQLVLEPLEMNENLENSKIDETLTIKTRSKCDLYGEKAKNQGGVVLKASVLEEELKDALIHQMPPFISAQKHRPTDSPEMNGGCNSNGQFRIEFADLSPSPSSFEKVPDHHSCHLQLPSDECEHFETCQDDSEKSNNCFQSSELEALENGKRSTLISSDGVSKKSEVKDLGPLEIHLVPYTPKFPTPKPRKTRTARLLRQKCVDTPSESTEEPGNSDSSSSCLTENSLKINKISVLHQNVLCKQEQVDKMKLGNKSELNMESNSDAQDLVNSQKAMCNETTSFEKMAPSFDKDSNLSSDSTTVDGSSMSLAVDEGTGFIRCTVSMSLPKQLKLTCNEHLQSGRNLGVSAPQMQKESVIKEENSLRIVPKKPQRHSLPATGVLKKAASEELLEKSSYPSSEEKSSEKSLERNHLQHLCAQNRGVSSSFDMPKRASEKPVWKLPHPILPFSGNPEFLKSVTVSSNSEPSTALTKPRAKSLSAMDVEKCTKPCKDSTKKNSFKKLLSMKLSICFMKSDFQKFWSKSSQLGDTTTGHLSSGEQKGIESDWQGLLVGEEKRSKPIKAYSTENYSLESQKKRKKSRGQTSAANGLRAESLDDQMLSRESSSQAPYKSVTSLCAPEYENIRHYEEIPEYENLPFIMAIRKTQELEWQNSSSMEDADANVYEVEEPYEAPDGQLQLGPRHQHSSSGASQEEQNDLGLGDLPSDEEEIINSSDEDDVSSESSKGEPDPLEDKQDEDNGMKSKVHHIAKEIMSSEKVFVDVLKLLHIDFRDAVAHASRQLGKPVIEDRILNQILYYLPQLYELNRDLLKELEERMLHWTEQQRIADIFVKKGPYLKMYSTYIKEFDKNIALLDEQCKKNPGFAAVVREFEMSPRCANLALKHYLLKPVQRIPQYRLLLTDYLKNLIEDAGDYRDTQDALAVVIEVANHANDTMKQGDNFQKLMQIQYSLNGHHEIVQPGRVFLKEGILMKLSRKVMQPRMFFLFNDALLYTTPVQSGMYKLNNMLSLAGMKVRKPTQEAYQNELKIESVERSFILSASSATERDEWLEAISRAIEEYAKKRITFCPSRSLDEADSENKEEVSPLGSKAPIWIPDTRATMCMICTSEFTLTWRRHHCRACGKIVCQACSSNKYGLDYLKNQPARVCEHCFQELQKLDHQHSPRIGSPGNHKSPSSALSSVLHSIPSGRKQKKIPAALKEVSANTEDSSMSGYLYRSKGNKKPWKHFWFVIKNKVLYTYAASEDVAALESQPLLGFTVIQVKDENSESKVFQLLHKNMLFYVFKAEDAHSAQKWIEAFQEGTIL

SEQ ID NO: 219 - protein, 485 aa, Homo sapiens
  source 1..485: note = sp|Q6AZZ1|TRI68_HUMAN E3 ubiquitin-protein ligase TRIM68 OS=Homo sapiens OX=9606 GN=TRIM68 PE=1 SV=1
MDPTALVEAIVEEVACPICMTFLREPMSIDCGHSFCHSCLSGLWEIPGESQNWGYTCPLCRAPVQPRNLRPNWQLANVVEKVRLLRLHPGMGLKGDLCERHGEKLKMFCKEDVLIMCEACSQSPEHEAHSVVPMEDVAWEYKWELHEALEHLKKEQEEAWKLEVGERKRTATWKIQVETRKQSIVWEFEKYQRLLEKKQPPHRQLGAEVAAALASLQREAAETMQKLELNHSELIQQSQVLWRMIAELKERSQRPVRWMLQDIQEVLNRSKSWSLQQPEPISLELKTDCRVLGLREILKTYAADVRLDPDTAYSRLIVSEDRKRVHYGDTNQKLPDNPERFYRYNIVLGSQCISSGRHYWEVEVGDRSEWGLGVCKQNVDRKEVVYLSPHYGFWVIRLRKGNEYRAGTDEYPILSLPVPPRRVGIFVDYEAHDISFYNVTDCGSHIFTFPRYPFPGRLLPYFSPCYSIGTNNTAPLAICSLDGED

SEQ ID NO: 220 - protein, 1356 aa, Homo sapiens
  source 1..1356: note = sp|Q8TEW0|PARD3_HUMAN Partitioning defective 3 homolog OS=Homo sapiens OX=9606 GN=PARD3 PE=1 SV=2
MKVTVCFGRTRVVVPCGDGHMKVFSLIQQAVTRYRKAIAKDPNYWIQVHRLEHGDGGILDLDDILCDVADDKDRLVAVFDEQDPHHGGDGTSASSTGTQSPEIFGSELGTNNVSAFQPYQATSEIEVTPSVLRANMPLHVRRSSDPALIGLSTSVSDSNFSSEEPSRKNPTRWSTTAGFLKQNTAGSPKTCDRKKDENYRSLPRDTSNWSNQFQRDNARSSLSASHPMVGKWLEKQEQDEDGTEEDNSRVEPVGHADTGLEHIPNFSLDDMVKLVEVPNDGGPLGIHVVPFSARGGRTLGLLVKRLEKGGKAEHENLFRENDCIVRINDGDLRNRRFEQAQHMFRQAMRTPIIWFHVVPAANKEQYEQLSQSEKNNYYSSRFSPDSQYIDNRSVNSAGLHTVQRAPRLNHPPEQIDSHSRLPHSAHPSGKPPSAPASAPQNVFSTTVSSGYNTKKIGKRLNIQLKKGTEGLGFSITSRDVTIGGSAPIYVKNILPRGAAIQDGRLKAGDRLIEVNGVDLVGKSQEEVVSLLRSTKMEGTVSLLVFRQEDAFHPRELNAEPSQMQIPKETKAEDEDIVLTPDGTREFLTFEVPLNDSGSAGLGVSVKGNRSKENHADLGIFVKSIINGGAASKDGRLRVNDQLIAVNGESLLGKTNQDAMETLRRSMSTEGNKRGMIQLIVARRISKCNELKSPGSPPGPELPIETALDDRERRISHSLYSGIEGLDESPSRNAALSRIMGESGKYQLSPTVNMPQDDTVIIEDDRLPVLPPHLSDQSSSSSHDDVGFVTADAGTWAKAAISDSADCSLSPDVDPVLAFQREGFGRQSMSEKRTKQFSDASQLDFVKTRKSKSMDLGIADETKLNTVDDQKAGSPSRDVGPSLGLKKSSSLESLQTAVAEVTLNGDIPFHRPRPRIIRGRGCNESFRAAIDKSYDKPAVDDDDEGMETLEEDTEESSRSGRESVSTASDQPSHSLERQMNGNQEKGDKTDRKKDKTGKEKKKDRDKEKDKMKAKKGMLKGLGDMFRFGKHRKDDKIEKTGKIKIQESFTSEEERIRMKQEQERIQAKTREFRERQARERDYAEIQDFHRTFGCDDELMYGGVSSYEGSMALNARPQSPREGHMMDALYAQVKKPRNSKPSPVDSNRSTPSNHDRIQRLRQEFQQAKQDEDVEDRRRTYSFEQPWPNARPATQSGRHSVSVEVQMQRQRQEERESSQQAQRQYSSLPRQSRKNASSVSQDSWEQNYSPGEGFQSAKENPRYSSYQGSRNGYLGGHGFNARVMLETQELLRQEQRRKEQQMKKQPPSEGPSNYDSYKKVQDPSYAPPKGPFRQDVPPSPSQVARLNRLQTPEKGRPFYS

SEQ ID NO: 221 - protein, 327 aa, Homo sapiens
  source 1..327: note = sp|O75436|VP26A_HUMAN Vacuolar protein sorting-associated protein 26A OS=Homo sapiens OX=9606; GN = VPS26A PE=1 SV=2
MSFLGGFFGPICEIDIVLNDGETRKMAEMKTEDGKVEKHYLFYDGESVSGKVNLAFKQPGKRLEHQGIRIEFVGQIELFNDKSNTHEFVNLVKELALPGELTQSRSYDFEFMQVEKPYESYIGANVRLRYFLKVTIVRRLTDLVKEYDLIVHQLATYPDVNNSIKMEVGIEDCLHIEFEYNKSKYHLKDVIVGKIYFLLVRIKIQHMELQLIKKEITGIGPSTTTETETIAKYEIMDGAPVKGESIPIRLFLAGYDPTPTMRDVNKKFSVRYFLNLVLVDEEDRRYFKQQEIILWRKAPEKLRKQRTNFHQRFESPESQASAEQPEM

SEQ ID NO: 222 - protein, 4563 aa, Homo sapiens
  source 1..4563: note = sp|P04114|APOB_HUMAN Apolipoprotein B-100 OS=Homo sapiens OX=9606 GN=APOB PE=1 SV=2
MDPPRPALLALLALPALLLLLLAGARAEEEMLENVSLVCPKDATRFKHLRKYTYNYEAESSSGVPGTADSRSATRINCKVELEVPQLCSFILKTSQCTLKEVYGFNPEGKALLKKTKNSEEFAAAMSRYELKLAIPEGKQVFLYPEKDEPTYILNIKRGIISALLVPPETEEAKQVLFLDTVYGNCSTHFTVKTRKGNVATEISTERDLGQCDRFKPIRTGISPLALIKGMTRPLSTLISSSQSCQYTLDAKRKHVAEAICKEQHLFLPFSYKNKYGMVAQVTQTLKLEDTPKINSRFFGEGTKKMGLAFESTKSTSPPKQAEAVLKTLQELKKLTISEQNIQRANLFNKLVTELRGLSDEAVTSLLPQLIEVSSPITLQALVQCGQPQCSTHILQWLKRVHANPLLIDVVTYLVALIPEPSAQQLREIFNMARDQRSRATLYALSHAVNNYHKTNPTGTQELLDIANYLMEQIQDDCTGDEDYTYLILRVIGNMGQTMEQLTPELKSSILKCVQSTKPSLMIQKAAIQALRKMEPKDKDQEVLLQTFLDDASPGDKRLAAYLMLMRSPSQADINKIVQILPWEQNEQVKNFVASHIANILNSEELDIQDLKKLVKEALKESQLPTVMDFRKFSRNYQLYKSVSLPSLDPASAKIEGNLIFDPNNYLPKESMLKTTLTAFGFASADLIEIGLEGKGFEPTLEALFGKQGFFPDSVNKALYWVNGQVPDGVSKVLVDHFGYTKDDKHEQDMVNGIMLSVEKLIKDLKSKEVPEARAYLRILGEELGFASLHDLQLLGKLLLMGARTLQGIPQMIGEVIRKGSKNDFFLHYIFMENAFELPTGAGLQLQISSSGVIAPGAKAGVKLEVANMQAELVAKPSVSVEFVTNMGIIIPDFARSGVQMNTNFFHESGLEAHVALKAGKLKFIIPSPKRPVKLLSGGNTLHLVSTTKTEVIPPLIENRQSWSVCKQVFPGLNYCTSGAYSNASSTDSASYYPLTGDTRLELELRPTGEIEQYSVSATYELQREDRALVDTLKFVTQAEGAKQTEATMTFKYNRQSMTLSSEVQIPDFDVDLGTILRVNDESTEGKTSYRLTLDIQNKKITEVALMGHLSCDTKEERKIKGVISIPRLQAEARSEILAHWSPAKLLLQMDSSATAYGSTVSKRVAWHYDEEKIEFEWNTGTNVDTKKMTSNFPVDLSDYPKSLHMYANRLLDHRVPQTDMTFRHVGSKLIVAMSSWLQKASGSLPYTQTLQDHLNSLKEFNLQNMGLPDFHIPENLFLKSDGRVKYTLNKNSLKIEIPLPFGGKSSRDLKMLETVRTPALHFKSVGFHLPSREFQVPTFTIPKLYQLQVPLLGVLDLSTNVYSNLYNWSASYSGGNTSTDHFSLRARYHMKADSVVDLLSYNVQGSGETTYDHKNTFTLSYDGSLRHKFLDSNIKFSHVEKLGNNPVSKGLLIFDASSSWGPQMSASVHLDSKKKQHLFVKEVKIDGQFRVSSFYAKGTYGLSCQRDPNTGRLNGESNLRFNSSYLQGTNQITGRYEDGTLSLTSTSDLQSGIIKNTASLKYENYELTLKSDTNGKYKNFATSNKMDMTFSKQNALLRSEYQADYESLRFFSLLSGSLNSHGLELNADILGTDKINSGAHKATLRIGQDGISTSATTNLKCSLLVLENELNAELGLSGASMKLTTNGRFREHNAKFSLDGKAALTELSLGSAYQAMILGVDSKNIFNFKVSQEGLKLSNDMMGSYAEMKFDHTNSLNIAGLSLDFSSKLDNIYSSDKFYKQTVNLQLQPYSLVTTLNSDLKYNALDLTNNGKLRLEPLKLHVAGNLKGAYQNNEIKHIYAISSAALSASYKADTVAKVQGVEFSHRLNTDIAGLASAIDMSTNYNSDSLHFSNVFRSVMAPFTMTIDAHTNGNGKLALWGEHTGQLYSKFLLKAEPLAFTFSHDYKGSTSHHLVSRKSISAALEHKVSALLTPAEQTGTWKLKTQFNNNEYSQDLDAYNTKDKIGVELTGRTLADLTLLDSPIKVPLLLSEPINIIDALEMRDAVEKPQEFTIVAFVKYDKNQDVHSINLPFFETLQEYFERNRQTIIVVLENVQRNLKHINIDQFVRKYRAALGKLPQQANDYLNSFNWERQVSHAKEKLTALTKKYRITENDIQIALDDAKINFNEKLSQLQTYMIQFDQYIKDSYDLHDLKIAIANIIDEIIEKLKSLDEHYHIRVNLVKTIHDLHLFIENIDFNKSGSSTASWIQNVDTKYQIRIQIQEKLQQLKRHIQNIDIQHLAGKLKQHIEAIDVRVLLDQLGTTISFERINDILEHVKHFVINLIGDFEVAEKINAFRAKVHELIERYEVDQQIQVLMDKLVELAHQYKLKETIQKLSNVLQQVKIKDYFEKLVGFIDDAVKKLNELSFKTFIEDVNKFLDMLIKKLKSFDYHQFVDETNDKIREVTQRLNGEIQALELPQKAEALKLFLEETKATVAVYLESLQDTKITLIINWLQEALSSASLAHMKAKFRETLEDTRDRMYQMDIQQELQRYLSLVGQVYSTLVTYISDWWTLAAKNLTDFAEQYSIQDWAKRMKALVEQGFTVPEIKTILGTMPAFEVSLQALQKATFQTPDFIVPLTDLRIPSVQINFKDLKNIKIPSRFSTPEFTILNTFHIPSFTIDFVEMKVKIIRTIDQMLNSELQWPVPDIYLRDLKVEDIPLARITLPDFRLPEIAIPEFIIPTLNLNDFQVPDLHIPEFQLPHISHTIEVPTFGKLYSILKIQSPLFTLDANADIGNGTTSANEAGIAASITAKGESKLEVLNFDFQANAQLSNPKINPLALKESVKFSSKYLRTEHGSEMLFFGNAIEGKSNTVASLHTEKNTLELSNGVIVKINNQLTLDSNTKYFHKLNIPKLDFSSQADLRNEIKTLLKAGHIAWTSSGKGSWKWACPRFSDEGTHESQISFTIEGPLTSFGLSNKINSKHLRVNQNLVYESGSLNFSKLEIQSQVDSQHVGHSVLTAKGMALFGEGKAEFTGRHDAHLNGKVIGTLKNSLFFSAQPFEITASTNNEGNLKVRFPLRLTGKIDFLNNYALFLSPSAQQASWQVSARFNQYKYNQNFSAGNNENIMEAHVGINGEANLDFLNIPLTIPEMRLPYTIITTPPLKDFSLWEKTGLKEFLKTTKQSFDLSVKAQYKKNKHRHSITNPLAVLCEFISQSIKSFDRHFEKNRNNALDFVTKSYNETKIKFDKYKAEKSHDELPRTFQIPGYTVPVVNVEVSPFTIEMSAFGYVFPKAVSMPSFSILGSDVRVPSYTLILPSLELPVLHVPRNLKLSLPDFKELCTISHIFIPAMGNITYDFSFKSSVITLNTNAELFNQSDIVAHLLSSSSSVIDALQYKLEGTTRLTRKRGLKLATALSLSNKFVEGSHNSTVSLTTKNMEVSVATTTKAQIPILRMNFKQELNGNTKSKPTVSSSMEFKYDFNSSMLYSTAKGAVDHKLSLESLTSYFSIESSTKGDVKGSVLSREYSGTIASEANTYLNSKSTRSSVKLQGTSKIDDIWNLEVKENFAGEATLQRIYSLWEHSTKNHLQLEGLFFTNGEHTSKATLELSPWQMSALVQVHASQPSSFHDFPDLGQEVALNANTKNQKIRWKNEVRIHSGSFQSQVELSNDQEKAHLDIAGSLEGHLRFLKNIILPVYDKSLWDFLKLDVTTSIGRRQHLRVSTAFVYTKNPNGYSFSIPVKVLADKFIIPGLKLNDLNSVLVMPTFHVPFTDLQVPSCKLDFREIQIYKKLRTSSFALNLPTLPEVKFPEVDVLTKYSQPEDSLIPFFEITVPESQLTVSQFTLPKSVSDGIAALDLNAVANKIADFELPTIIVPEQTIEIPSIKFSVPAGIVIPSFQALTARFEVDSPVYNATWSASLKNKADYVETVLDSTCSSTVQFLEYELNVLGTHKIEDGTLASKTKGTFAHRDFSAEYEEDGKYEGLQEWEGKAHLNIKSPAFTDLHLRYQKDKKGISTSAASPAVGTVGMDMDEDDDFSKWNFYYSPQSSPDKKLTIFKTELRVRESDEETQIKVNWEEEAASGLLTSLKDNVPKATGVLYDYVNKYHWEHTGLTLREVSSKLRRNLQNNAEWVYQGAIRQIDDIDVRFQKAASGTTGTYQEWKDKAQNLYQELLTQEGQASFQGLKDNVFDGLVRVTQEFHMKVKHLIDSLIDFLNFPRFQFPGKPGIYTREELCTMFIREVGTVLSQVYSKVHNGSEILFSYFQDLVITLPFELRKHKLIDVISMYRELLKDLSKEAQEVFKAIQSLKTTEVLRNLQDLLQFIFQLIEDNIKQLKEMKFTYLINYIQDEINTIFSDYIPYVFKLLKENLCLNLHKFNEFIQNELQEASQELQQIHQYIMALREEYFDPSIVGWTVKYYELEEKIVSLIKNLLVALKDFHSEYIVSASNFTSQLSSQVEQFLHRNIQEYLSILTDPDGKGKEKIAELSATAQEIIKSQAIATKKIISDYHQQFRYKLQDFSDQLSDYYEKFIAESKRLIDLSIQNYHTFLIYITELLKKLQSTTVMNPYMKLAPGELTIIL

SEQ ID NO: 223 - protein, 722 aa, Homo sapiens
  source 1..722: note = sp|Q9P2Y4|ZN219_HUMAN Zinc finger protein 219; OS = Homo sapiens OX=9606 GN=ZNF219 PE=1 SV=2
MEGSRPRAPSGHLAPSPPAFDGELDLQRYSNGPAVSAGSLGMGAVSWSESRAGERRFPCPVCGKRFRFNSILALHLRAHPGAQAFQCPHCGHRAAQRALLRSHLRTHQPERPRSPAARLLLELEERALLREARLGRARSSGGMQATPATEGLARPQAPSSSAFRCPYCKGKFRTSAERERHLHILHRPWKCGLCSFGSSQEEELLHHSLTAHGAPERPLAATSAAPPPQPQPQPPPQPEPRSVPQPEPEPEPEREATPTPAPAAPEEPPAPPEFRCQVCGQSFTQSWFLKGHMRKHKASFDHACPVCGRCFKEPWFLKNHMKVHASKLGPLRAPGPASGPARAPQPPDLGLLAYEPLGPALLLAPAPTPAERREPPSLLGYLSLRAGEGRPNGEGAEPGPGRSFGGFRPLSSALPARARRHRAEEPEEEEEVVEAEEETWARGRSLGSLASLHPRPGEGPGHSASAAGAQARSTATQEENGLLVGGTRPEGGRGATGKDCPFCGKSFRSAHHLKVHLRVHTGERPYKCPHCDYAGTQSGSLKYHLQRHHREQRSGAGPGPPPEPPPPSQRGSAPQSGAKPSPQPATWVEGASSPRPPSSGAGPGSRRKPASPGRTLRNGRGGEAEPLDLSLRAGPGGEAGPGGALHRCLFCPFATGAPELMALHLQVHHSRRARGRRPPQADASPPYARVPSGETPPSPSQEGEEGSGLSRPGEAGLGGQER

SEQ ID NO: 224 - protein, 801 aa, Homo sapiens
  source 1..801: note = sp|Q9UN66|PCDB8_HUMAN Protocadherin beta-8 OS=Homo sapiens OX=9606 GN=PCDHB8 PE=2 SV=4
MEASGKLICRQRQVLFSFLLLGLSLAGAAEPRSYSVVEETEGSSFVTNLAKDLGLEQREFSRRGVRVVSRGNKLHLQLNQETADLLLNEKLDREDLCGHTEPCVLRFQVLLESPFEFFQAELQVIDINDHSPVFLDKQMLVKVSESSPPGTAFPLKNAEDLDIGQNNIENYIISPNSYFRVLTRKRSDGRKYPELVLDKALDREEEAELRLTLTALDGGSPPRSGTAQVYIEVVDVNDNAPEFEQPFYRVQISEDSPISFLVVKVSATDVDTGVNGEISYSLFQASDEISKTFKVDFLTGEIRLKKQLDFEKFQSYEVNIEARDAGGFSGKCTVLIQVIDVNDHAPEVTMSAFTSPIPENAPETVVALFSVSDLDSGENGKISCSIQEDLPFLLKSSVGNFYTLLTETPLDRESRAEYNVTITVTDLGTPRLTTHLNMTVLVSDVNDNAPAFTQTSYTLFVRENNSPALHIGSVSATDRDSGTNAQVTYSLLPPQDPHLPLASLVSINTDNGHLFALRSLDYEALQAFEFRVGASDRGSPALSSEALVRVLVLDANDNSPFVLYPLQNGSAPCTELVPRAAEPGYLVTKVVAVDGDSGQNAWLSYQLLKATEPGLFGVWAHNGEVRTARLLSERDAAKQRLVVLVKDNGEPPCSATATLHVLLVDGFSQPYLPLPEAAPAQGQADSLTVYLVVALASVSSLFLFSVLLFVAVLLCRRSRAASVGRCSVPEGPFPGHLVDVRGTGSLSQNYQYEVCLAGGSGTNEFQLLKPVLPNIQGHSFGPEMEQNSNFRNGFGFSLQLK

SEQ ID NO: 225 - protein, 1147 aa, Homo sapiens
  source 1..1147: note = sp|P36956|SRBP1_HUMAN Sterol regulatory element-binding protein 1 OS=Homo sapiens OX=9606; GN = SREBF1 PE=1 SV=2
MDEPPFSEAALEQALGEPCDLDAALLTDIEDMLQLINNQDSDFPGLFDPPYAGSGAGGTDPASPDTSSPGSLSPPPATLSSSLEAFLSGPQAAPSPLSPPQPAPTPLKMYPSMPAFSPGPGIKEESVPLSILQTPTPQPLPGALLPQSFPAPAPPQFSSTPVLGYPSPPGGFSTGSPPGNTQQPLPGLPLASPPGVPPVSLHTQVQSVVPQQLLTVTAAPTAAPVTTTVTSQIQQVPVLLQPHFIKADSLLLTAMKTDGATVKAAGLSPLVSGTTVQTGPLPTLVSGGTILATVPLVVDAEKLPINRLAAGSKAPASAQSRGEKRTAHNAIEKRYRSSINDKIIELKDLVVGTEAKLNKSAVLRKAIDYIRFLQHSNQKLKQENLSLRTAVHKSKSLKDLVSACGSGGNTDVLMEGVKTEVEDTLTPPPSDAGSPFQSSPLSLGSRGSGSGGSGSDSEPDSPVFEDSKAKPEQRPSLHSRGMLDRSRLALCTLVFLCLSCNPLASLLGARGLPSPSDTTSVYHSPGRNVLGTESRDGPGWAQWLLPPVVWLLNGLLVLVSLVLLFVYGEPVTRPHSGPAVYFWRHRKQADLDLARGDFAQAAQQLWLALRALGRPLPTSHLDLACSLLWNLIRHLLQRLWVGRWLAGRAGGLQQDCALRVDASASARDAALVYHKLHQLHTMGKHTGGHLTATNLALSALNLAECAGDAVSVATLAEIYVAAALRVKTSLPRALHFLTRFFLSSARQACLAQSGSVPPAMQWLCHPVGHRFFVDGDWSVLSTPWESLYSLAGNPVDPLAQVTQLFREHLLERALNCVTQPNPSPGSADGDKEFSDALGYLQLLNSCSDAAGAPAYSFSISSSMATTTGVDPVAKWWASLTAVVIHWLRRDEEAAERLCPLVEHLPRVLQESERPLPRAALHSFKAARALLGCAKAESGPASLTICEKASGYLQDSLATTPASSSIDKAVQLFLCDLLLVVRTSLWRQQQPPAPAPAAQGTSSRPQASALELRGFQRDLSSLRRLAQSFRPAMRRVFLHEATARLMAGASPTRTHQLLDRSLRRRAGPGGKGGAVAELEPRPTRREHAEALLLASCYLPPGFLSAPGQRVGMLAEAARTLEKLGDRRLLHDCQQMLMRLGGGTTVTSS

SEQ ID NO: 226 - protein, 829 aa, Homo sapiens
  source 1..829: note = sp|O60658|PDE8A_HUMAN High affinity cAMP-specific and IBMX-insensitive 3',5'-cyclic phosphodiesterase 8A; OS = Homo sapiens OX=9606 GN=PDE8A PE=1 SV=2
MGCAPSIHISERLVAEDAPSPAAPPLSSGGPRLPQGQKTAALPRTRGAGLLESELRDGSGKKVAVADVQFGPMRFHQDQLQVLLVFTKEDNQCNGFCRACEKAGFKCTVTKEAQAVLACFLDKHHDIIIIDHRNPRQLDAEALCRSIRSSKLSENTVIVGVVRRVDREELSVMPFISAGFTRRYVENPNIMACYNELLQLEFGEVRSQLKLRACNSVFTALENSEDAIEITSEDRFIQYANPAFETTMGYQSGELIGKELGEVPINEKKADLLDTINSCIRIGKEWQGIYYAKKKNGDNIQQNVKIIPVIGQGGKIRHYVSIIRVCNGNNKAEKISECVQSDTHTDNQTGKHKDRRKGSLDVKAVASRATEVSSQRRHSSMARIHSMTIEAPITKVINIINAAQESSPMPVTEALDRVLEILRTTELYSPQFGAKDDDPHANDLVGGLMSDGLRRLSGNEYVLSTKNTQMVSSNIITPISLDDVPPRIARAMENEEYWDFDIFELEAATHNRPLIYLGLKMFARFGICEFLHCSESTLRSWLQIIEANYHSSNPYHNSTHSADVLHATAYFLSKERIKETLDPIDEVAALIAATIHDVDHPGRTNSFLCNAGSELAILYNDTAVLESHHAALAFQLTTGDDKCNIFKNMERNDYRTLRQGIIDMVLATEMTKHFEHVNKFVNSINKPLATLEENGETDKNQEVINTMLRTPENRTLIKRMLIKCADVSNPCRPLQYCIEWAARISEEYFSQTDEEKQQGLPVVMPVFDRNTCSIPKSQISFIDYFITDMFDAWDAFVDLPDLMQHLDNNFKYWKGLDEMKLRNLRPPPE

SEQ ID NO: 227 - protein, 255 aa, Homo sapiens
  source 1..255: note = sp|P14207|FOLR2_HUMAN Folate receptor beta OS=Homo sapiens OX=9606 GN=FOLR2 PE=1 SV=4
MVWKWMPLLLLLVCVATMCSAQDRTDLLNVCMDAKHHKTKPGPEDKLHDQCSPWKKNACCTASTSQELHKDTSRLYNFNWDHCGKMEPACKRHFIQDTCLYECSPNLGPWIQQVNQSWRKERFLDVPLCKEDCQRWWEDCHTSHTCKSNWHRGWDWTSGVNKCPAGALCRTFESYFPTPAALCEGLWSHSYKVSNYSRGSGRCIQMWFDSAQGNPNEEVARFYAAAMHVNAGEMLHGTGGLLLSLALMLQLWLLG

SEQ ID NO: 228 - DNA, 450757 bp, Homo sapiens
  source 1..450757: mol_type = genomic DNA; note = NC_000005.10:108746085-109196841 FER [organism=Homo sapiens] [GeneID=2241] [chromosome=5]
agtaagtaatgctattagaacagacaaagtttggtatttgagaacatggaatatatactaaggtgacacacagtgtttattaaatgtgttgcaatgcaatgtgataattccaacagaggaaaaaaatgtgaaactggatttgctatatatttttgtatgcttcaaaaatgcagcatagatttttgccacattcatttacttcaagtatattctttcacaactgcatttcctagcacaatgactggcatatggtagacagcttttaaggttttggaatgaataggtgagaactcagagaacaattgtagatatggaaagattcttgctgatttttctagatttgggttccttaacacaaacacacatgttgtgtatcaaacagctctatttctaccatatctttattgaaagctactttctgcaaatatgtaataacgtattcaccaaccacatctttctacattttgattccctttgtataaatggagaaattctaaggttcttgggaaaggtattcagtcatgaagcagtctccaaagttgtattttggccttacctaaccaaattttcattcatttcattcttattgacattacatatactataacatttgatgttcacagaaaattaacttctattttaagaagtttactcacagaaccacagtttgtgcatttaacaatcactatgaaatacatatgaaacattaaccatcattttagagaacaatttaaaaactccgaagtaactactttccttaactttgtcatcccaacattctgggtataggcattgttggaaaaatataattaaaaaccaaaatctcccaacccagaaatcctctccacaaacgttagtagacaaaacacttttattactgaataagcattaaacgagactgtgatacacatcacaggcaatttgctaagagattgcaaagacagaaatcttgcccttttgtatagccaagtatatacgacccattacatacacgttttcaagttgaacaataactagtcctcaagtaagaggacctgacatttgtgacattaactttacttaataattggggtgaccatctgtgttagttaattggttttatccagaggaaaaacaaacttctcctgtctttatgacggaaggtagttttgcaacacggagcaagttgctcaccgaagttacgctcctactctctcacagaaactgggagatagggaaggatgctactccgttgatatgtgcagcatttcaaaaaaaaaaaaaaaaaaaaggtccagagacattcctgactgagcatacagttgacaagacctatctagtcctcaagtggatttatacacatttcaaagagttgagaaagtacttaacaattaagaaagtacttaagttttctaagacaaatgctcggagagaaagggacgggaaatctcatcctccattttcaatagggagaattaagcctcttatttaaaatttttatgttggtttttgtttatttagctttaaaacagtagacttaaaaaaagtccaacttaagatttatgtttttttatgtgtagggctgttctctacggttaaataaataaccctgcttagagaaaatattcaccactcttctttggctcctatgtaactcagtttttgagagggaggggaaataccggattgacgctatgtggttcaaccaatgcaaaagataacaccgccttaaaaagtctactacaggaacatgggagggtcacaccctcgaataatgacgcatacctatcctactgttactgatcacctagtaataatcttgtagttcacattactcatttttcaccaaattcttttggtgaaggacgcttcagaaacggccatcactgaagagcagacccgtttgggttctccacgcattctagactcccgaagaggtaagaatttattatagggggccactcccaggacctgctgtatgcttttaaacatccattacaattccagcattgagtttctaacatttttaggcaggctcaggcactgggagtacaggattgaaagacagttcccgtccttaagggactcagagtaaactggagttgctgaaaaccattctaaagcaatccacgttaataacagatacaagtaaaacgtgggaacgtacaggaaaaagtgaccaattctgaggctgaaaagtgcctattttaggggtgggggcctcgcggccctaaagcagcttcccttcccggagatttcagctccagggatcgcccagcgccctccgggcacacttaacattttaatcacgcctccgcccccactctccgaattcctttccggctgccgacccgccgagtagtcccttccaggcggcctcagcttatcatcgccggtccggccacttcccggccgcggccaggcgagcctcccaaagtttcctgtgaggccttcgtccgtctccggccccatctcaccacggcagcccaggacacccgctagggaggagcaggttaccgaggcggggagagcggcacaaacgcgcagacctcgggactccacccgggctggtgagcgagcccagaaagcggcgaccgcagctccgcgtctccactcccagggcccgcagcttgggctaagcgtgcgcccacccagcctagggcccaagtcctgccccttcggggaccgggccaatcggccgctccccgcctcctgggaggtagtggaggagggggctgagggccgggcggctgcgcccgccttccgctcttgcccattggctgaggcctcgagggtgcccggagaccggagtgcagcgggattggttgcagaggttcgtgacagtggcgcctattggctgtggcagcccccgtgacgcggggtggtgactggctccggagtctgaggggttcgggcttgtcaggttctaggtaggtgcgtttcgcgccgccggcggtaggcgctgttgcccggggcaacgcggggggaggggggaagaggagggaaggcaagcctagagcgggggcaacaatgcctgcccgcagaggggcgcccgggattcggccagggcgttgggggctgtgccgaggctcttcctccgccctcagccagcgccccccccaacccccgtccctggctgcagggtcatccgctcatcctcccgcccgcagcagagcattcctggttggggcttgggccgggctacacacccagccccacgagggccgcccctcccaccatcccgggacccgaaggctgagggggcgggtgccggcgcgaaagggctgtggcgggcgtagtggctccgccccgtcgcggggtctgggggctgatgggcgtgaggcggggtggtggggggactgtgggcaccacccaatcttgcctgtaccctcaccccttttctcggcggcactcatctgggcgccgccgtcccgctacgggggcattctcaacccctggtattccccccatcccttcctgcttctggagccccgcagtctcccttgacccgctcggtcctccccagctctcctcctatctgtcaccttctcccgcttttatcccccacctcatctttctcctccggtcttggccagaggtgtcctccaagagtctaatcaagagatagatcttaagtgtgaagctagtggtgtcgtcggtaatttctgctctgtggtctctttgccagttagaattggggagatgtttggaggcaccttcaggggtcatccttctgccttacagttacccctaggatctactttctgaatacgctcattgggttgtgttggtaggggcaaggtacttcttaaacaaattgaggattgtactatgaggtgggcactttgtacgtttgcgattttgccatccactgtagtgcaattcaaaatctaataatttgttacggctggtagccttacatttttttccttcgccttatggttaaaaaaagagcagctttttaacctttttaattcagaagttgcgtatattaatggttgtctcactatcactttgacataaactgctgtaaaggtgtactccattttccttttctccagatatgttaagataataaatttctcagatgaggttaccatatataaaagtgtagtggaacatcaataagagaatagatcaaaactattttagtgattaaagattagaaaatacttttcaattcatatgtggaatgagaataggataaaaaaaaaaaactattgcaaaatctttagtgcagtatttgtagtcctggtatatatacctgtgttgcccttaagaagacatttgtgagtagctccaggtttgtcagtcgggaaagcagagtgtatctttttgtagtccaggaaagcttttctgctagtacttttgagccaagagaattatgcttccaaagatgctgggaatatattaagagagtacataggcatacttctgttttcatctttgaaagacctttagtgaagatctgtttctcttctgcattgattgttgacagcattaaatatacataatctaaaactatgtagtgtcaagttgttgcagcttctgcactgcttcaaaggttgatgtctttagttcagaagaaataattcaagctttggtagacaaatcatttacatttcatcttcgatgtagatgttactgtaactctggaccgtgaacatttcaaatttgccagttttttctcaactattttactatgaaaaatttcaaacaatgcagaagagtcgagttgaacccaccacctatatatttagcaataacgatttcaagaccactgttacacagtaaacattaaggaatagaggaactgaaatgatcaagcttaaaaaaccagcgtatgtggccgggcgcggtggctcatgcctgtaatcccagcactttgggaggccgaggcgggcggatcacctgaggtcgggagttcgagaccagcctgaccaaaatggagaaacatggtctctaataaaaatacaaaattagccgggcatggtggtgcatgcctgtaatcccagctactcgggaggctgaggcaggagaaccgcttgaacccgtgaggcggaggttgtggtgagtggagatcacaccattgcactccagcctaggtaacaagaccgaaactccatctcagaaaaacaaaaaacaaacaaacaaaaaaaccacaaaaagcccagcatatgtatatacatgtatatgtagtatacatgtatatacacaccaccaaattataaggtgcttatttttgtttgtgagtgggaattgtacttactaaaactatactaacttaattacatgagactattcaaagcaatcttgtgagtgaggtaggaagtcatcatctttgtaatcaaggcccaaataagtaaactgcattttggtaatcagacaaaaggaaatctgatgaacttgttatacaaaaaaacgttttgcttcaaaattggactcctgtgtaaatagattatagttttgtacttgatttataaataaacatcttttggagggaagtccaagggactatcaattatgtaaaattttggtaacttgataaattgggtcaatcttatgtctgttcatttggaataagaatgtatttttgtaatggaaaaagcttacaaaggtgaactttttttagtagaactgcttcatggagactgacgtaattagagaaatttaagtcagtatttcgataggactcaacgatcttgggtgttgtctcatggttctgaggaatattttgatataaaacttcaatttatagtaaaggaataagtggaaatgggtataaattcacacatttgtatatttgtaatttttctatacccgagaaatttgtgtacacctttttaagtatttgaatcttgctttttagtttttgcataccctaaatctgtttttcatacttacctcgttcatatagtaatttcttaaatattaagggctatgtctcagaatttatagatctctggattgctttattactatttttccaaatttcatttgtctttggtatgcttatgtatggttaacctatcatgctattgagagactgaaggaaacaattaggtcacagttttagaactttagttgtagattcagtgaactcagaaacaattggattttttaaaatcaaggctccaattttcccttccctcccttcctccttccctttttttactccttttctttcttatttttgtttgattataaatgttaaatgccttacaatcaattcagaaaactatagagaagaaaatgaagtcactcatcattctaccataatgatttgaaaactaacaaactttgatttcttctgtaacactctaccaattattgagattttatggttttcatttcagtgtatctgcattcacatcaaaatttgtaagagttcctgaacttgaggctgttaccttaaattagaagagggctcctagatctgggggaaaaatggaaaagaataaatagaggacagattagagtcagaacagaggaattagacccaagcagttactgtttcttattctgtaagtataaatattttagtttaccatataaaactgctgtatggctgacaaaatatgaggccatattttttctttggaattcaaagtatctaggtaaaacaaagttttcttggttcttttcaagaaatagttcagatttcttcatttttggaggatattacataattcagctttaaaaatttaatgtcatgcatgtttggaattattttaaaaatattcatatcagacaattactaatttttattcatcatcaccattcattataaacttgatattgtcactttttttagtaggtattaaaagactggacattttatgtaggttttccttgctaggtttcaaagtgtagtgaaaagaggagccatttattttagagtcagataatcgggttttagttccagtttctgttctgtgggatcttggacaagttattttatctctttaagtcataattttctcatctattcaatagggatagtaaaattgcttcactagcttgttacatagaagaaatgagacaatgtaggtaagatttaggaagtattaaactgactttaggaagtattcagcttctgtattcagttctttatgtgataacattgattttatctctccttgtattaatgtgtttattataccatccacaaagtccttgtttcagacataagaaattaaaatataattaaatttacttaaatttaaatttacaataaatttacttaagttgaatgacatttgcatttatacaaataaatagttagaaatatctcagattagctgttctttttataaatcttagcttattgtatctcagcagggataattataaatttactttaaatgatttttaactccaaaatatctccagtttgtctggattcctgatttatttttctttttgcctagatgatcatgtgtttttggatggttgccctaaattcctttcatttaaaccacaggtattagctacacgttactgtcttaaatctctaactagtgcccccgcaaacacattttctcaatctgtttaaaatttaaacttcatttttaaatttaataatacccttatttgtatattagttgtgtcttttccacctcctactgaaacgtatgattattttttaaggagcagtattttacagatatccctgtttcagattgtgtgttctgtaaatacagggttctaattcttaaagaacatacagtttaaatgggcagaccagcctatggttattctgtgtagagaagcaagcactgaactgacttagcagttgaactagagtccatatggtctcatccagcagtaaaacagatttttgtgatccaagtcagttttcttatattttttcccgtccaggtacaagatatttacatgtatgacatattccactgtgcagttttctagcatgcgagctctaattcagtctctctcctattcaagaaagcatattagaatgcagatgattgagagtgacatcattatgggtataaacttgaatctactctgatttattggagaaagtgagtcattaaaaaatgtgggctgggtgcagtggctcatgcctgtaatcacagtattttgggaggctgaaacgagaggatcacttgagcctagaagtttgagagcagcctgggtaacataacgagacggcactctacaaaaaagttaaaaaattagcccgatatgatggcatgtgcttgtactactactaaggtggctaaggcaggaggattccttgagcccaggagttcaatactgcattgagctatgattgcagcactgtgcttcggcctgggcaacagagtgagtccctgtctcaaaaaaaaaaaaaaaaaaaaaaaatagtgtgtaagtattgttagtaacaagtactgaagacataccttacaattctgtaagggacccaagttatttccacattttcctgaagtgaatgcccctttagtttttcttatcattcttataatgctacataagaaaatattattacactaattttatgtcattaatagagacctatatttaaaagttagaataacttaatgaacatgtaaaaatatttaggtaacagtacctcagtctgtattgtgactggaataacactaattgttgtacaaaaattgaaattagttttctagtgtaaatcattttgcttgcaaaaaggctatttctatattgggactcatggttttaagagaagtggaaacagtactagaatttttattttctaggcacttagaatgtaaaaatgctctttacattggctcagtcagaaaagtatctttgcattaccatgaatagagcttaattttaaatcactcatcctatgtggaagtaccacgtataatatacagttccaagtgaagacttagtagacctttgatatttgcaagtggtatttcctgaaacctttgtgaatctaggatataaccacctccataaaatgcagtcaaatttaatggaaaagtttaagtgatcccttcagacccgtacaatccggtaaggaggactcgagtcattaaagctattaatttttttgcttctgaaatgaagactagacaactttgcattacattatttgtatacaggcaaggttcttattcttgccccttgtatcctatagtttgcagaataaaagagcatttctggcttaatcacaaagcttgctgcgttgtcacaaggtttagtccttggtcgctgtaatgcttttctgtatgcttctgtttcttggatgttttctccttggagttgaacacttctgtagtatgtgtcctttctctggatgtcttcagcttgggagactttcccaagcttccgtggattgatggggctcccttgttaatttcacattctacaaagaaaagtgcatttgactcttctagcagtgttcagggtttttttgttgttgttttttgagacagaattccactcttgttgcccaggctgaagtgcaatggcacaatctcggctcaccgcaacctccacctcccgggttcaagcaattctcctgcctcagcctcccgagtagctgggattacaggcatgcaccaccacgcccggctaatttttttgtatttagtagagatggggtttcaccatgttagtcaggcttgtcacaaactcctgacctcaggtgatccacccgccttggcctcccaaagtgctgggattacaggcatgagccacagtggctggctgcagtgttcagttttgataacaaatgggtcagtagccaccctagcagctataccacatcttgttttatgaaaatatacagtatcagccgggcactgtgggtcacacctgtaatcccagcactttgggaggccgaggtgggtggatcacctgaggtcaggagtttgagaccagcctggccaacatggtgaaaccctgtctttactaaaaaaatacaaaaattagctgggtgtgatggcacgcacctgtaatcccagctacttgggagactgaggcaggagaattgcttgaacacgggaggtggaggttgcggtgagccgagaccatgccattgcactccagcctgggtgacaagagcgagaaactccatctcaaaaaaaaaaaaaaaaataataataataaatacaataaaaagaaaatatacagtgtcttgactttctcttgaattatttttcttttagaattacatgctttctatgtacgttcttatataggttaaccattacttaaattttcactaaggttttagaaactttgctttactaggagcaaaggaaacattttcaggtatcaccttttttctttgtttcagtatagaagtgtgtgatggactttgtaatatggaaaatccagtcactatcgcatttcctgaccattctgaatctactccaaatttatgtatttggctaagtaccattactttgtgatgcctgtttacttttaatatatttaataaatttgctataggagagtaattaaggggaactaaacaatgtagttgtttcagataattattaatgataacatataatggtaatatgtaattaattataggtcaatataacttattaatatactatataattaatgatagatcagtatttcaattatttacaagcatttatgttggggatgatgtatgagaatctttatgtagatttatatacaatagaaaattttacaaaggaagaagccaatttctttctcctacacacacacacattttttgttttgtttttgtatagttcttttttctcccctcctcaacattttaacctcccaggtagagacagtttctgtcaatataagtcttaagtcttttagtaaattacatggcttcagatataatggtgggggcactaacatttctttagtgcctgctaaaagtgtgatgcacttttgtacatttcttttgaatttatgaatttgatggcttgcatgttctttttgtgatctggaaccaattttaggtcatatcatttatccaaggagacccagttataaaatgatactgggatttgaacttgggtgtttcatactctaaacctgaaataaatgtaaatggtaaaagtctgtagtaaactattaatggtcctggatttaatagaagtttcagctatttgggagcaactctaaaggtctatgttgaaatatttgcagttttgctgagattacttcctctcattagaagcaagaccctaagatattcatgctcctggctaacagtcttgtgtctatatcttgctttggctttgttctgtttgagattgtcctaaactataacttctgtgaagttataacatgtttctttgtaaaaaaatttcctgaaaaagaaagccagctgctagaagtggagagagaataaagaggcctgagaaggtggtggatcttagctagaaaacagacatttttgaataaatttaacaatggaatgttgaattcagtgagtctttgatcttgacgcacatcaatcctccatgccttagaggtaaaaaaaagttaatttgtgaaacattttcattgagtgttccagctctgtcaaaaattctcatggtctttagacagacttcttgaaaatgtcaggaatcttacgttcataaatcctgtcctccatcccttctgtcgcaccctcaacaataatatttgaaaggaatttgtttattaacagctactactttctagaagttaatatagttctgacaaatatcttaaaatgttaacataaacaacagtgtcctaacttctgggataataggggtttgctatggtgactatttcacaattaatcataacaaatataggagctagaccttaccttggtggttgcctgttttaagtttctgatttcttttctgtattttggagcctggtttaccctgtgtctggaactggcattctaagatctaaatgtcttagcttggagatacttgctattatatacactaatatcatggattttgaaagaggatgaagatggtgaagagatagacatggccttcaatctacattataaaaataatgtagaaatgttctatgctagacaagaggcaagctgttgcaggaatgggacagaaagcaggaagggatgtgattcttccattttcggtctttctacagatgttactagaatacacaccccatgtgaggatttagcttatgggtacagatattataaagcatagagaggtttcggactgttttcctgagagggagtgtggtgtggggaaaagagcaaacctacctagagttgaatctgtgctcctagtaatagctgtatgaatttagacaaataatttaattcttataactttgggatttttcaagttcaaactaagggtgataatactagaattttcacgattcttcagttgcatgagaccaaaactctgctcatacttagggcactgaaactagaagtatattctctttaggtacagatagaccctcatgtaggccttctccatatggagctctgtgacatttctttcagttgggttcaggaagccaaacataaagacttctgttttccttagttctagcaaaagttccaggattgtgtctcgttgaaggattccaatcatttccccatccctgatcccatcgtcacagggatgatatatgatgataggccatatctggattaggtgctaattactggaactaggaataggaagtgtggtcagctatgtctaagccctttggcctgagattcacaatggttagaatcactcgaggaaggagaagatactgtgaccctggaaggagggagtagatgctgggtgagcaaaacgcatttactatagtcctctagcgtgcatacatttcctcctttgtatatatgcccttgaaaaaaatgccctcacctatcattgtgtaaatttcttgcttataactttcgatgcatttaccacctgtccctcaagaaaagaagacaactaagagatttgtttaagtactgcatctagctttaagactaggatctctggataatttctttagctctgtttgaacagactgtcttagggtctagcaacttgcagttgaccagtataattaattgtagtaaggccagttttcagtgatagaaggaaaatagcatgtggacaacaaaaacccttaattgatatcctacttcatcactcttaagttctgcctgctgtaaagtcctggacatggacataattcaggcaagtgcttaatcactttataacaaggatggcctttcccccagtttccaatactttgttctcatttctgtctgagacctcatcagaatagcctttactgttcatatgtctaccaatattctgttcatggcaacacaggctttttctagcattcatcttcagaactgttatagcttctacccattacccaattccagagctgcttccacatttttaggtatttgttatagcaacatgccacttctctggtaccagtttctgtcttagtccattttgtgcttctataacagaataccacagactgagtaatttaaaaataatagaaatttattctctcacagttctagaggctggaaatttcaaagtcaaggtgtagacatctcatgagggccttcttgctgtgtcctcacatggcagaaagccgaagggcaagagagggatgaactgtgtgtcctcacatggcagaagagaagagaacacattcctgcaagctctttttgtaccagcattaatccattcatgaggactccaccatcatggtttaggtttaggtttgagacctaaacaccttccaaaagtccacaccttccaatacaatgaccctggggaagttttcaatacatgaattatggagagcacacattcaaactatagcaactggaagagggaaaaaggggaaacagcccacagagatatctcatccataatacaggtatatttcactggatagatatgacaaggattttttgccctggcagtggaataagatttttgcttagccaatatggcagaatggatgttgcgttagcagtcacaaaaacaacattactctagtacatctccatcagagtttttgggtgaccaggtgcattgttgatgatcaataatattttgaaagcagtcttctgttttttttttttttttctgagcagtaggtctgaacaatgggcttaaaatattcagtaaaccatgctgtaaacagatgtgctgtcatacagcctttgtgttttcattcctatagcacaagcagagtagatttagtatcattcttatggactctgcaatatttagaatgggcaatgagcattgggttcaacttaaagtcaccagctgcattagcccataacaagagtcagtctgtcctttgaagctttgaagtcacgcattaacttttcttctgtagctatgaaagtcccagatgacattttctttctatataaggctgtttcatatacactgaaaatctgttgtttagtgtagccaaattcatcagtgatcttggctagagttttggataacttgctgcaacttgtacatcaccacttgctgcttcaccttgcacttttatgttgagatagcctctttccttcagcctcatgaatcaatctctgctagtttcagagttgtcttctgaagcttcctcacctcacccagacttcatagaattgaagagagttaaggccttgttctgggttaggccttggcttgaggaaattttgtggctggtttgatctatctagactactgaaactttctttatatcagcaataaggctgttttgctttcttgtcatttgcgtgttcactggaggagcacttttaattttcttcaataacttttcctttgcttttacaatgtgggtgtttggttcaagaggttcagcttattttggctttcttttcttttctttttttttttgagatggagtctcgctctgttgcccaggctggagtgcagtggcacgatctctgctcactgcaacttccgcctcctgggttcaagcaattctcctgcctcagcctcctgagtagctgggattacaggtgcccgccaccacgccagctaatttttgtattttcagtagagatggggtttcaccatgtttgtcaggctggtctcgaacccctggcctcgtggtccccccacctcggcctcccaaagtgctgggattacaggtgtgagccactgcacctggcctattttggctttcaacatgccttcctcactaagcttaatttagcttttaatttaaaatgagggatgtgcaactattccttttatttgaacacttagaggcctttgaaggattattaattggcctaatatcaaattgttgtgtctcatggaacagggaagtccaagaagaaggagagggagtagagaatggctggtcagtagagcagtcaaaacacacataacacttatcagttaagttcaccgttatatatgagtgtggttcttggtgccccaaaacaattaagatagtaatatcaaagatcactgatcacagatgaccataaaagataataatgaaaaagtttgaaatattgtaagaatcaccaaatgtaacacagaggcgtgaaatgtgtatatgctttggaaaaatggtgccaatagagttgctcagtgcaggattataatagaccttcaatttgtaaaaaagggaatatttgtgaagtgcagaaagtcgaagtgcaataaaacaagatatacttgtctgatttatgagaacagcaatttaccagctattttgcttattaagaattgctgacttcttaccctaaagtagaggattaccaagtttccttcactttctgttattgactcagtcccacattttagaagtgtaacttgtattaccttatttctagtataattattattattattatttttttaagatggagtctcactttgccacccaggctggagtgcagtggcatgatctcagctcactgcaaccttggcctcctgggttcaagcgattctcctgcctcagcctcccaagtagctgggactataggtgtgtgcctccacacctggctaatttttttttgtatttttaatgcagacagggttttaccatgttggtcaggctggtcttgaactccttacgtcaggcaatctgcctgccttgtggtataattttttatgtttgttaggctagttttggatgccagtggcagacacctatttaacaatttagtccttcccatctttgtaaatggcagctccatctttgtttttgccctgaccccagtgtgagcaaagttatccttgattcttttcctttagttcttcaacttagtctttcagcatactctgttttcttcaaagaaatacctataatctgacttgctctcaccacccctacttctatcatcctggttcggcaacatcctttttctccttctgcatgattcctaaaaagtctccccactactactgttgctctaaataaatagcctgtgttatcctttttagacgtaagagatcatgtcttttcttgctcagaatctttcaggggtttcccacataaaagctcaagtccttaaaatgagctatagtttcatggtcctgctttccttccttcatgcaggatctttctctgaactagttcttctctgaactgtagtttaaaatgggccacggttttgtggttctgttctccctccctcatgcgggatttttttactattttctccaccattcactgcacacaggcctccttgtttttccttagatagacattttgtactttctgttctctgcttagaatgcccttcttccagatagcggttcctttagctaaccatgtgactaacttccttatctccttcaggtctttggtaaatgtcactttatctgtaaagtctttaatcactcaacataaatttgaaatctcctacctacttcatacttacctttttctgcttttaaaaatagtgcttattactacctaacactgtgtattttacttacttattttgtattttgtttgtttcctctttctagaatataatctccaggaaggcaagaatttttacctgttgtataggaaaactcatggcacacagatagcatagtaggctttcagcaaatatttgttgaacgaattaataaataagaaaaaaaaaatgtgtcgttgcctcacgtaaccattaactctgaaactctgaagggacttagaataccctgtttgcaaacaagcaagttaccttgccatacttttatatacatacattaatagaagagccctgggtcagagactcagagggtttattgcagtaaaagcagtggccagagaaatatcttagtgctagttctccctgccccatctctgtgacaaaacaatgtgatgagggccaggtgtttacctacacatgcagcagatttgcatcataggagaggagccttgaaatgaggagactccaagcttgtatagggtgttggcacatctgccatcctcccctgcagagcgagagagagattacttattaaacacatcgcttccagaggagagggagaaggtatctttaggtttcttaccctagaatataagtaaatgtttccagggaggggaaggagaaggcttaatttctccaaagctctttggagttttctatctttagggagatactgtctctagcttccaaggctgtctgttatgcaaatatccatttgtagtacattttggtcagaagattctgtgcaggaacatgagaaatgcagagtgaattgtttcccagcagtaattctgaattccagcagctatatctatttacatctgaactcatatataggggcaaaatattttcagacatttctccgtttctcttctcttggttctttgtttgggttgcttgattgtctagtaggtacttatcatcatctttcagtttagcaaccttggctgaaagatgactttccttcctgattagcttctgcaaaaatgttgggattcagtattatctgttcaatttgggtaacatacctattcctaaactactgcttgcgagaaggaatatgctgatttcccagacccaggttatgttcctaccccagaaacattagagtgctggtgatcaatgccacccaaaccgtgtggattgatgataagagaaggatagtttgggaaaagaaaattaagatgctgctaccaacagaaggggagatagatgcttcagagtaaaaaacaacacaggtctattacttacatgcacatgcaactcacaatcatttaaaaaaatataatcttactgtatatagatataactacttcatttattttttacctaccacatatcatgaacaagaaattttctttgaaaacaattttattttattttttaaatttaattttattatttatttatttatttttgagacgaagtttcactcttgttgcccagactgcagtgcagtgacgccatcttggctcactgcaacctctacctcccgtgttcaagcgattctcctgcctcagcctcccaagtagctgggattacaggcatgcgccaccatgcccggctgattttgtatttttagtagagatggggtttctccatgttggtcaggctgatcttgaactcctgacctcaggtgatccacccaccttgacctcccaaagtgctgggattacaggcatgagccactgcacctggccgtggaaacataattttaaatggttgtaaaattatacttaaattctttgtttaaaataaatatttagtttatcagaattggattttgaaaaactaaggggatatttattagagaagtggggagagtagagatgggaaagagaagtagagccaggactagggtaaggcaagagagttgcctaggacacaaaatatgagacataatcacttttagggtcatgcagctgcagggtggcacttgcatgatcctgagagtatctccttaaattttgcgccccaggtatttcttttgcatcaccctagtcccatttgtgaagacaagcatatttcagggaataggaactattttttggctatgaatgtgcgttagagatgaaagtatgtgtaattgaggaagttcttggggaagattaaggtgcattagaaagcagtcattatgcattttcaactgttatgtatggaaacgtttgctgagtctggtaagcatgataatacctttgaagtaacgcaaggaatataatttttttgattcataggtttatagtagtttgaattttaaaaagttccatttagagatgccaccaaaaaaagttgttacttttaacccaaatcttttcaatatcaaagaaaaatgctttttgtttcattggaaaataaaaattatagaaaagactgagttagagattgagacacaatacatgggtcctgtgactagcttactttcttttctcttttctttttttttgacagggtattgctctcttacccatgcttgagtacagtgatgtgatcacagctcattgcaggcttgacctcctaggctcaagtgatccttctgcctcagcctcttgagtagctaggactacagtgggctagctttcctgagcaagatacttgacactgctcaatattgggcatggaatctcagttgaatagttgtctttcttgaacttaggtctgtggaaataaccatttccatagcaaagtgagagactagaacagggaattctaaataatgcaactatctttgctgatagagaagagagtttaaacatttttcatattaattggatgatctagtaatttttgggtttgtctttggagtggaattggatacatatataatgtgttttgttcctcagaaagctgtatgagtaatactgtttactgaactataccctggggatttaattaaagatgatgtgttgaaagcagtcaaaagtgaagtcatgactgaatttttttttttttttgaagcagggtctcactttattgcctaggctggagtgcagtggcacaatcattgttcactgcaacctcaaattcctgggctcaggtgatcctcccaccttagcctctcaagtagcagggactacaggtacatgccaccatgcctggctaatttatataatttttttgtagagacgggctctcactatgttgtccaggagggtttggaactcctggactcaagtgatcctcctgccttggcctcccaaagtgctgacattactggcatgagccacctcatctggccatcattaaaattttatatttaaaaataattttgtcatgaattttatcgttttatataacaactcttgttgatgccttactttacaccaaagtgtacaaatcagaggaaaccataattcattttggaatttcattcatttggtagtcacttgtttgatggctactgtgttccaggtactatgcaagtggctgactgtgttaagatagaaattcttgtctcatttatgtcacagttttatggaagaagagaaatgtattaacactttaattacatatagattagatttccaaccaattctagctttaggagctttgctatatctagaagggaataaaatgttttcctaagggcgaaggcaccctttggaaatggttaaaagattagaaaagtagacttggagaatatgcctgacatactgtgtttgatctgtttgctgaccagaaggagaggaataatcttgttggtaacatttatggaatgtcatctgattgatgtgaaagtcaaggcagtagaggaaatgatgggagacagagtaggcaaacaaaaaagaagaacttggaagaaggggagagtttatgataaaccaggaagttgggattaaaaatagtatggcacaggcaaaaagtgagacgttgtaacagggctgtaaactacatatattgacctcagtgataaaggagagagtgaccaagaaaacctctcagaagagttcacagttttcaaggactgaagggagaacagccaattcaaggatcatactttggcatactgaagcctatgaggcagaggccaggcgcagtgacccatgcctgtaatcccagcattttgggaggccgagatgggtggtggatcacctgaggtcaggaattcgagaccagcctgaccaacatggtgaaaccctgtctgtactaaaaatgcaagaatcagctgggcgtggtggtgcatgcctgtaatcccagatactcaggagcctgaggcatgagaatcacttgaacccaggaggtggaggctgagtgagtcgagatcatgccagagcactccagcttgggtgacagagtgagactccatctcaaacaaacaaacaagcaaataaataaataaaacatatgaagtggagaaagtatgtgtttgctgggggaatccttcccaaaccttccccagcctttgaaaaagtttttcttatgtacttaattactactttaggctgtaataatattttaacaagcataatcactggcttcttctgatggcctttcagactttttcggtttttgagacagtcttgctctgtcatccgagctgaggtgcagtggcatgatcatggctcactgcagcctcaacctcctgggctcaagcagtcttcctacctcatcttcccaaatagctgagactacaggtgtgtgccacgatgcctgactaatttttaaacttatagagactaggtttcactgtgttgcccaggctggcctcgaactcctgtactcaggccatcctcctactttggccttccacagtgttgggattacaggtgtgagccactgtgcctggtgtgtttcaaacttgaagttagttttatgatgtaaacgtggagaaaaacatgaattacctcttgaaaactgagggaataggttggaggagaaggtaacaatacattactgtttcggaaagttagagaaagataggggagggagtaagcaatggatagataagttaggtaagtgtagcattcttatttttaacgtagcaattgtcataagctgtcacagttaatttccaggaatagccaagtatactgaaagtgtacatttttatctctttctctgtagtgaacagttctgactccttgaatttcttcttgcagctcatgttttttggctagacctatgaccattttcgctagacttcactgcacgttttctcaagtatcttctttgtccctaatgtgtgacacctcatcatggacacgctactttagctaaggcatgaccagcaatgaacagtagtaaggtaggattactttattcttcttagtaagttactaaaccgttttttattttgggtctctgaaattgtgacttgtcttgattttgtagtattctttatgttagattattctactgtctatgtaggctgttactgttttatatttgtgtttatttattttttgcttgtcatctatcccaatgattttacctcatttgtgacataattatttttctcaactaacacttataattagcagaatcccaatctgtatctcttcctcaatctgtgtgcccaccagtcctatattttcaaccatttggcaccaaactgaacatatcatatttttcttctcaaatacttgcactttgttctgatttctgtatttccattaatagcattattaatctcattgtctaatataatcatatattcattgattcattaattcatttgaggtacattgatattcttctaagtgtcatacagtgtgctgcctctgaggatgtaatgatgaatacactggatgttccatccttatttctatccttatattctgggggaggggataggttaaaaataaattgacaaaacaattatgaattataatacaattttttttttttttgagacagggtctggctctgtcgcccaggctggagtgcagtggcacaatcttggctcattgcaacctccgcctcctgggttcaagcgattctcctgcctcagcctcccaagtagctgggattacaggagctcaccaccactcctggctaatttttgtatttttttagaagagatggggttttgccacattggccaggctcttctcaaactcctgacctcagatgatctttctgcctcagcctcctaaagtgctgggattacaggcgtgagctactgtgcctggccttataatacaattttttaaggaaagcaaaagaacagataatttggagttgaggaggtggaatctactttagatagggtcatataaggctcctctgaggggctgtaatttaagatgagacctattatatgagaaggagctatttaaagagtgagtgttggggcaggggaagggagtagtttttgattggaagagcattctcattagaaggaatatggtgtgcagaaaccctgaatgaggaaggagcttggtgaatttgagggaccaaaaaataccagtgtggttgacacagagaaagaggcagatttgagtaggaagagattatagaaatatttagggctttgaagggtttggcccgaggtttgcattttatatcattttaactgctgtgtgagacatggactggttgaaaggaaagtgaaagctggcttttaggagctgaggtgagatagtgatggcctgcatgatggttgtagcaataagggagagatggatgaatttgagatgcatttttgtgttttttttagacagaactcataggacttgtatgttgtttgggcatggaaagagagagagagaacatactcaaggatgacttcaagaattttggtttttgagcagctgattagaagctggtatcatgtacagaaaccttttagaaaactatctttcttgttaactgatggattgcttattttagcaaaaggcacttagctatagtgctagaaataatattagtgctggaaataaagcatctggcaaatttgtaatatatactagttaatactttattttgctttttttccactgatgatgatgatgatgatgatgatttttttttgagacggagcttcactcttgttgctcaggttggagtgcaatggcacaatctcgattcaccacaacctccacctcttgagttcaagcgattctcctgcctcagcctcccaagtagctgggattacaggcatgtgccaccatgcccggctaatttcgtatttttagtagagatgaggtttctccatgttggtcaggctggtctcgaactcccggcctcaggtgatcctcccaccttggtgtcccaaagtgccggggttacaggcatgagccactgcgcctggccttgtataatttttaattaattatgagttgaattttatctgacttcagagtctttctggaagtaaaaataattggtctatacttttatactgagttttaagtctactatcccttgtgctcttttaaaagagataattcttttaagatttttggccagtccgaaatcttcccagactgttaattcaaagttctaatatgtaattttattgttatttatttcaaagatttccttttttctttctttatgggacagagtctcgctgtattgcccaggctggagtgcagttgcacaatcacagctcattgcagcctggagacggagacagagttttgttatgttgtgcaggctgttctcctgagctcaagccatcctcccacctcagtctcccaaagtgttgggactacatctgtgaactacagtgcctggcctatttggagattttcaagcatctcacccttagatgtatgtcatactaacctcacttgaaagcatctagcttgtctaaattcctaggaggttcatttattatctttttggttttacagcttcatcagaggatatttatattcagcttcttaggattgatatttcaggtgcaaagtgaaatggaataaaccttaaaataaatctgtgtattattcgtttcttctaaattcatcagtagtcctacctttcatttttttctctgaaaaaaaatttttttttttgagatggagtctcactctgtcacccaggctggagtgcagtggtgtgatctcggctcactgcaacctctgcctcccgggttcaagcagtgttctgtctcatcctcccgagtagctgggattacagatgcccgccaccatgcccagctaatttttgtatttttagtagagacagggtttcaccatgttggccaagctggtcttgaactcctgcccttgtgatccacctgcctcggcctcccaaagtgctgggattacagacttgagccaccatgcccggcccctctgaagaatttttaagatgttttctcaaaaaagttagtgtgtgtgctgtctataaaaggcatttggttatctgttttaactattttatttttatccttaaacagttctattttttccactttgcatatggttatcttttgagttttagagctgagaggtagtagtagaattttagtagtagtaggattttataactgaaaaatgccttggagattattccacttccttctcctttagctgggacctagagaggttctgtgacctgcccaagatcatgtagctggctttcataattgttgaggctagtgctgctttcactcatcatgcttcaaactggtctcctctcatgctttctgtatttctctcttttcaacatttattgaaaatgttcagtgccacatcaaaattgagtatataggacaatgaacacctatattaccttttacctggactcactgttaacattttgccacattttctttgttcacatatttatatatgtaaaaaatatgttaaaaaatcatttgaaacaatattaaagacatcatgataacttaaaacttttagcatgcagatcctgagaacatgggtaatttcctacataatcacagtaccaatatcatatataagaaaataaccataacattaagaatgtatttgtctttttgttcattttggctgctatgacaaaatacctgagactgagtaatttataaacaacagaaatttattttgcatggttagggagtctaggaagtccaacatcaagacaccagcaggtttagtgtctggagaaggcttgttcttcatagtttgtgcctttttggtgacctcatatgacaggagggatggaactgcgaagggggaatgcagctctctgcagcctcttttatagggcattaattctgtctatgagtgcagatcattcatggcctagtcacctcctgagggcccctactcttaatactgtcaccttggggggttaagttgaattttggagggacacatatattcaaaccatagtagtgtttaatgcagtggttcgtattcagatctcccctgttatgccatatatatatgtatgtatatatatatacacatatatatgtatatattttgttgttgttgttataggattcaagcaggtttcatgtattgcatttgcttcttatgcctctttattcttttttattttcaaacagctgcttgctttttttttcatgatctgtattttcttttaagagataagatttgtatgtacttaacatctcttctgggaattgcctggtttcttagaatactattcaaccaaaatttatttgcagtttgcctctttgtttaaattccctgagatagctggagataacattgtcatttccaagcttttttttcctcaaaacataatttcaactttaaatatacatgacattggctgtggtttttacatttggttgcattaagttaaagataagaaaactgggagatgtatgttggacttgatctgctggcactagtcagcaattgaaattcaaggcgttcctcctccaccctccattgcctatactcaccttctaaccaggaattctatctaggaatatgtatctattaatagtagctttggacattataaagcagtagcagtctagtctttcagaaatgcatactttcaagtcagaagtagattaaaatgcaaatgatgtgtaagcaagtacatagagacactcagagctaagcacaatcagaaaagatttaattaaataccctctctctctggtacttgtgtagaactgtcactcagcgagtgttctcttttaccttctttccgtgcttttgcgtttcatagatttggtaggttttctttgagaagggtatgaaatttggaacgagtgtagcttttttaggaagaggtagggataacttttaagtaggatatttacttttatttattaattttttattattttaagctcagggttacatgtgcaggatgtgcaggtttattatataggtaaacatgtgccatggtggttcgctgcacagatcatcccatcacctaggtattaagcccatcatccattagctattcttcctgatgctctccctttccccacacccctgctgtcccacaggccccagtgggtattgttcccctccctgtgtccatgtgttctcattgttcagctcccacttaggagtaagaacatgtggtatttggttttctgttcctacgttactttgctgagaattatggcttccaattccatccatgtcctttcaaaggacataatctcattcctttttatggctgcatagtattccatggtatatatgtacacttttttttaatccattctatcattgatggccatttaggttaattccgtgtctttgctgttgtgaatagtgtggcagtgaacatatgcatgcatgtatctttataatagaatgatctgtatttcactgggtatatacccagtaatgggattgctgggtcaaatgatatttctgtctctaggtctttgaggaatcgccacactgtcttccacaatggttgaactaatttacactaccaccaacagtgtaaatgcattcatttttctccacaacctcaccaacatctgttggtttttgactttttaataataaccattctgactggtgtgagatggtatctcattgtggtttttgtttgtttgtttattttactttaagttctggtatacatgtgcagaatgttcaggtttattacataggtatatgtgtgccatggtggtttgccgcacctattgacccatcctgtaagttccctcccctcacctcctcaccccccaacaggccctggtatgtgttgttcccctccctgtgtccatgtgttctgattgttcacctcccacttatgagtgagaacgtgggatgtttggttttctgttcctgtgttagtttgctggggatgatggcttgcagcttcatccatgtccctgtaaaagatatgagctcattcctttttatggctgcatagtattccatggtgtgtatgtaccacattttctttatccagtctatcattgatgggcatttgggttggttctgtctctgctattttaaatagtgctgctgcaataaacatacgtgtgtgtgtgtctttatagtagaatgatttatgttcctttggatatagacccagtaatgggattgctgggtcaagttgtatttctggttctagatccttgaggaattgccatactgtcttccacaatggttgaactaatttacattcccatcaacagtgtaaaagcattcgtatttctccacagcctctccagcatctattttttcttgactttttaataatcaccattgtgattggcatgagaggttatctcattgtgcttttgatttgcatttctttaacgatcagtggagctttttttcatgtttgttggctacataaatgtctttttttgagatgtgtctgttcatatcctttgcccacttttagaagggttttttttttcttgtaaatttgttttagttccttgaaaattttggatattagacttttgtcacatgggtagattgcaaaaattttctcccattctgtaggttgcctgttcactctgatgatagtttctttcactgtgcagaagctctttagtttaattagatcccatgtgtcaattttggcttttgttgcaattgtttttggcattttcatcatgaagtctttgctcatgcctatgtcctgaatgattttgtctaggttttcttctagaatttttatggttttgggttttaaatttaaatctttaatccatctgagttaatttttttgtagggtgtaaggaagtggtccagtttcagttttctgcatatggctagccagttttctcagcaccatttattgactaggagatcctttccccattgcttgtttttgtcaggtttgtcaaggatcagttggttgtagatgtgtggtgttatttctgaggtccctgttctgttccatttgtctatatatctgttttggtactagtaccatgaatgaattttgaatgaattaattgtatcctcattacctgtgaacttgtctagttatttttactacactgtaaattgtttgaaggcagtaatctagattttattcatctttgtatcccttacgattatctgtcacatgattccctaataaatgcctgttgatttatatcaataccttaaagaaaacatttttgttaataattctgctctccttaaataattttaaatatcagtacttcaaatgtagtttaaaaataaaaatataatagttgatttaaaagcaaacatgttattcatttgtttatagactttcaaagtttttattaattgttttctctcagtgggagatcatcatgcgttaatgttgctccaataggctggccagtcaggtgctgtttcacttgcatgtaacttttatattaaattgagttagaaccaacactttcaaattaagaaagcataggaggagttttaaatattatgtccataggtagtgaaggtcagcatatgttaattggtaatgaatgatattattttggtagctaagctttggtgactgttcatttctgcgtttaagtgcttctgaaaaaagacctcgctttgtattcatgtgaggttagttttttggtttgtacttgcatgcttagtggctttttgtgactttgtttctatcttgctgtggcagcttaatattttattcaaacacagtcactctatttgtgacttctaactgtcagtattgaagcatgtaaaaggtaggaaataccttatgataattcatcttgtactttattttatagtctttatacaaacatattctgataatataacttgaaccataaactaattttgataggtttttattagtcaaggattataaattcaagctgtattgaatttccttctagttaataagaatatatgttgggggaagaatgaaggatttcttatttctgttacatagtttttattcacgtatttctgatttttataaattagtgtactttcagtagtatagttgaatctctatatcaatgttaaaataaataaatgaatattttcaaccataaaacataatcctgttaaaaaataaattgcccctacaatttaggcaatttattactaattacaaaaaagcaaatatttaaaactaattaaatttcatgttaggtaaaaacaatatttccatctttgtacttggagaatgtaaaaattgccagttgtggaggcaaaagttgaaaaacaggagacattttatacagatacttgcatatacccttatattcacaagaaatactgtgggaatccgattatccttccaaggaaactagttatctgttttacattttgctttttaataacttccatttctgtttaaaaactgtgtatttatagatttattttatgtaaattaaacttctgattttagaaaacagcaattttaatggttttttaaaaaagttttaaatcagtatttatggtgaattgaaaactcaacatgtaagcactcacttaatcctaaataccaaattaaataacattaaacaagatagatttaaataaatctaaatggtcaatactttgtaggatttttactagttttgctttttaaaaatatactttttaaaagtagatactgttgctaataacatgcatacacttttgtgtaatattctgtttctgcctgatttatacttactatgcaggaaatcatagaaactattgtttaaaaatctcatttttttaacctcgtcatgccaggcatattggcctatgcctgtaatcccagcacgttgggaggccagggtgggaggattgcttgaggccagaagttggagaccagcctgggattattgttgttgttttttaactggtgaatttggaaagatctttatagttataaattgtactttgtcagatatatggcttgcagatatggcttgcagatatttgctcccaatctgtagctggtcttattcttatttttatttttatgtaatagaatttttttagagcagttttaagttaacagcaaaatttggagaaaggtacagagatttcccacatacttccacccactacatatcctctgttatcaatatttctcaccagagtggtatatttgtttacaattgatgaacctacactgatatgtcattatcccccaaagactgtagtttacattagggttcactcttggcattgtacatattatgggtttggaaaaatatacagtgacatgtatgcaccattatagcatcatagagggtagtttcactgtcctaaaaatcctctgtactccaactattcattcctctcttccctctaaaccctggcaaccactgatctttttactgttgtatgagtccattttcacactgctgataaagacatacctgagactgggaattttacaaaagaaagaggtttattggacttacagttccacatgactggggaggcctcacaatcatggtggaaggcaaggaggagcaagtcacatcttacgtggatggcagcaggcaaagagagagcttctgtagagaaactcccatttttaaaaccatcagatctcgtgagacccattcacgatcaagagaatagcaagggaaagacccacccccatgattcagtcatctcccacagggtccctcccacaacatgtgggaattatgggagctacaagatgagatttgggtggggacacagaaccaaatcatatcaactgtcttcatagtattgcttttttcagaatgtcatataggtataattgtgtcatatatagccttttctgatagacttctttcatttagtaaggtgcatttaaatttctccatgtcttttcatggcttgatagttcagttctttttagtgctgaataatattccattgtttgtatttaccacagttcatctattcacctactgaaagacatcttggttgcttccaagttttggcaattatgaataaatctgctgtaaacattgatgttcaatgttcaggtttttgtgtggatataaaatttcaactctttccataccaaggacttacggggcatttaatttaatcatagttaatatgattgcattttgtatggtaagagtatgtttagttttgtaagaaactgccaaactgtcttccaaagtggccataccattttgcattcttaccagcaataaatgaaagttcctgttgttccacatcctcaccagcatttagtgtaaacagcgtcctggattttggctgttctgataaatgtgaggtggtgtctcaatgttgttttaatgtgcatttcctagaaatcatgtgatgtggagcatcttttcatatgcttattttctgtccgtgtatattatttggtgagttgtctgttaaggtctgtggcccatttttaaattgggttgttttcttattattctttgtacattttggataacggtcctttttcagaaatatctgttataaatatattttcccagtttgtggtttatcttttcattctcttgacagtgtgtttcaaagagcagaaaatataattttaatgaagttcagcttattctttctttcatggattgtgcctttggtgttaaatctcaaaagtcatattcaaactcaagggaatctaaattttctcctatgttgtcctctaggagttttacttttgcattttacattttggcctatgattgattttgagttaatttttgtgaagtgtgtaagatctgtgtctaggctcttttttttttttgcaagtggatgtccaattgttctagcaccatatagtgaaaagactatcttttcttggttgtattgctttctttgtcaaagatcagttgactgtatttttgttgatctatttgtatactctctattctgttctatcggtctatttgtctgttcttttgctcatgccacacttgtcttgattactgtaactttattgtaagtcttgaaactgggcagtatcagtcttccaactttattcttttcctttaatgctgtgttggctattctgggtcttttgccagcatctatttactgatctacacaaaataacttgataagattttgattgggattaaattgaatctataaatgaaattgggaagaattgacattttgacaatattgactcttcttgtccatgaacatggaatatctcttcatttatttagttctttgatttctttaatcaaaagtgtgtaagtttttctcatattcatcttgaacatattttgttagatttatatgtaagtatgtcattttggaggctaccaatataaatgttgttgtgtttttactttcaaattgtacttgttcattgctggtatgtaggaaagcaattgacttttgtgtattagccttgaagcctgccattgctgtaattgcatattagttcaaggagttcgttgggtcaattctttcagattttctacacagtcaatcttgtcatctgtgaacaaacacagttttattttattttttccgatcagtacactttaaaaatctccttcttatctcactgcattagctaggacttccagtaagatgttgagaaggagaggtgacgggacaaccttgccttgttccggattttagtaggatcaaaataataaaatactaattaccacctccatcctttgtaccattgctgttatttattacacttatagataaacatacataagcatatatctgtatacacacacataagcatacataatcgaatatattgttgctgctattttgaacaaatgcttatgtgttagatcgactgagagtgagaaaaacacataagcatacataatcaaatatattgttgctgctattttgaacagatgcttatgtgttagatcaattgagagtaagaaaaacaaatgttctttaaatcttaccttcacttattcatctccagtacttttctttatatagatctcaatttctgacctctatcatttttcttccccctgaagaacttttcttttggacatttcttgcaagttggatctactggcaacaaattccctcaatatttatgtttgagaaactatttctctttcacttttgaaggataatttttcaaggtacataattctaggttagtgggttttttttttttaattttttactttttatcttaagattttaaataattcacttcactcccttcttgcttatatggttttggaggtaatgtcaatgtaattattctctttgctctttgataggtaatgtcttttttccactgtcttctttcaggattttttctttatcttttattttctgtagtttgaattgtgataagcctaggtgtagttttttgttgttgttggttgtttgttttttaatcattatcctgcttggagttttctgagctttttggattggtggtttagtgctgacattgatttggtgaaattgtcatttattattgtttcaaatattttttctgttcctttctctcattcttcttttggtattcccattacatgtatgttacaccttttttagttgtcccacagtttttgtatattctgctctgtattttttcagtctattttctgtttgctttgtagtttttttttttaggtatctattgggatatcccttagatattctttcctcagctgtgtccagtctactagactgagcctatcaacttaattgaacccaacataggcattcttcatttctgttacagtgtttttgatctctggtgtttctttttggttctgtcttagaattttcatttctctgcttacattgcccatctgttcttatatgcagtctattttatccattagaacccttagcatattaatcatagttgtttttagtaattgagctgatgattctcacatcctttgccatgtctgagtctggttcttatactagctctctttcttcagactgtgtttttttgtttgtttgtttgagatggagtctcactctgtcacccaggctggagtgcagtggtatgatcttggcatactgcaacctctgcttcctgggttcaagcgattatcctgcctcagcctcccaagtagctaggattacaggcgcctgcttaccacacctggctaatttttgtgtttttagtagagatggcatttcaccatgttggccaggctggtcttgaactcctgacctcaggtgatccacctgcctcggcctcccaaagtgctgggattacaggcgtgagccaccgtgcccagcccagcctgtgttttttgccttttagtgtgacatataaatttttcttgatagctgaagctgatgtcttgggtaaaaggagctgctgtataggtctttagtaatgtggcagtaaggtgttgggggataggaagcattctacagtccaatgattatatctcagtcttttaatgagtctctgtgtctctgggtgtgaccttcacagatgtttgttagcactatccccgtctcccaaggtaagacagcatggctagtatgggctgcaattggtatttcctatttcccttcctataagttagttagactctgatagaaccccagcaggctctgactaaatagtttctcctgaaggaaagaccttattaagaacagaatgttctagcttatttaaaaatgattttgttttccctccctctgtcagaagtaatagggttttttttttttcccccaccctgtcatacatactgtgagaaccatattgatttactggaggtgaaactaataaaagtatgaaggctgtcttatgactgagtccccctggctttttaagtttcccacttgttggcactgagccttcagcagtttgtcaattacagttcagtttttcctaccctgcactggttcctgcagagttttctgcttcagtttgatgggattctttgcagtcacctgttcctccagtttgtggggcagtggtttgccgtgtgacttcatttctcttactgatcctagaagagttgtagatttttcagtttgtttagcttttcttgttggtaggatggcctagtgacttccaagtattttttttttttttaagagatgaaattttgctatgttgcccaagctggactcaaactcatggccttaaatgatcctcccccttcaacctcctgcatagaccacgtttcttacatgcccagtagaagccagaagttgcaacttgttttatcttgttcacatgagcaaaatattttacttttgatgaggtccattttattcattttttcttttttggattgtggttttggtatcaaatctaaggactctgcctagctttagatctgaaagatttcctcctgtattttttttctctaaatgttagcagctttatgtttacatgtaagtccataatccttttgagttaaatttttgttttctttttatttttttggtagagatggggtcgcgctttgttgcctaggctgatcttgaactcctgggctcaagcaatatgcctgctttggcctctcagagtgctgggattacaggtatgagccactgtgcaaggactgagttaaattttgtaacagttgccagtcaagtttcttttttcttttctgccaatagatgcctaattgcccctgtactgtttgttgaaaaggctattcttcttctattgaattactgttagccctttgtcaaaaatcagttaaacatatttgtgttggttattcctggattctctgttctgtttcattgatctattttctgtcttctactaatagtacactgtcttgatttctgtagctctacagcaggctggaccatatttctttgaattatctttcagtctggctctctttctcttctccttgcactctgatgatacaaatgttggatcttttgttgttgtcccacaggtccgtgaggctttcttaattttttctatttttttctgtgttgtttggattgggtgaattctgttgttctgtccataagctcattgactgtatcctgtgtcatcttcactctactattgagcctatctagcttgtcttttgttattgcatttcttagttacataattttcatctggttatttttataacttttatttccttgctttgatcttctatttttacatttgttttaagagaatttacaattgattgttgaagcatttttacgatggttgttttaaaattcttgtcagataatttcaacatctgattcatctaggtgtttgcattggttgattgtcttctctcattcaagttatgatttttcttggttcttggtgtgacaggtgatttccatttgaaacttaaatattttgtctaatatgttaggagattctgagggctagttcaaccttttattttcacaagcaatcatcctgtttaggtttatcatgcaggtcttagcctatatttttgtgggttgtgcttccaatgatagtttaattttgagtctgcactgttgttttggttggcttcttgtatctagtggcactagggctcccactggtctctgctgatgctgcctgagggagtagggattcattcttaggctgagttagtgtatatctattgctggggaagggatgggctgggatttccttaccatgctccctgctaccctgatgtctctggacaggggaggagagtcttggacatgtggagaacaagaggcttcctgagattggatatctagcaaaactgggtttggcttgccagttctgactgcctgttctgatgtctgtgggtagagaaggagatcctcagacctgtgaaggctgaggttcttgactggttcctgactaggccctctggtttcatgcctgtctttgtttctcttgatggaaaaggggaatctcgatttgccatcatcatgactgagcagatgaccctttgtggcaccctcagggccccaacggctgggtaaaccagaccactgctactccacagttcctggacaagatcctgtccacctctcaagacaagagcatcattacgtagaaattgagcagggaagattccaactatggcatcccacaacatgctctgtggggtcactcccacttttttagtgacttggtcacctcctcagatggtcacattaccctctcaagctccttggatggaaccccatgcctctaggatttcacaatgggcatcaccgtgagacaatttgtgggccataccaaggacgtgctgaatgtggcctcccctgacaaccagcagattgtctgtggatcatgagataaaacctcaagttatagaaaaccctgggtgccaagaccagcttgttcgtggagaccctaactcagcggcgctagaggaattaaagacgcacacacagaaatataacatgtggagtgggaaatcaggggtctcacaggcttcagagctgagagccccaaacagagatttacccacatatttattgacagcaagccagtgataagcattgtttctgtagattatagatttactaaaagtattccttacgggaaacaaagggatgggctgaaacaaagggatgggctctggctaattatctgcagcaggaacatgtccctcaggcacagatcgctcctgctatagtttgtggtttaggaatgccttaagtggttttctcgccctgggtgggccaggtgtttcttgccctcattccggtaaactgacagccttatagcatgggagtcatggccatcatgaacatatcacagtgctgcagagattttatggccagttttggggccagtttatggccagatttgggggcctgttcccaacacctgggtgtatgcagatacactgtctagtatgagagtcacagagtgggtgtcttgtgttcgcttcttgcctaacagcagcaaccctatcactgtctcctgtagctgggacaagctggtcaaggtatggaatctggctaactgcaagctgaagaccaaccacattggccacacaggttatctgaacactgtgactatgtctccaaatggatccctctgtgcatctggaggcaaggatggccaggccatgctgtgggatctcaacgaaggcaaacacctttatatgccagatggtgggggcattatcaacaccctgtgcttcagccccaactgctactggctctgtgctgccatgggccccagcatcaagatctgggacttaggggtaaatatcatcgtagatgaactgaagcaagaagttattagtactggcagcaaggcagaaccaccccagtgtacctccctggcctggtctgttggtggtcatttgtttgctggctacacagacaacctggtgtgagtgtggcaggtgacatgggcacctgctagaagtttatggcagagctttagaaattaagaaacgaacaaactggaaaaaaaaaagtggggagtctcaggccttatggtgaaggagagtgtttcccctggctgtttgtttttgttgaggttcctagttaatctctcttgctggtggtgtctggcttccttgatatttgtcagagggacatctattctattctgggaggaattagcctgcatgggctgccttctgcccctaggctgtggctgggaaaaaccaggtctgtgtggccttcttcacttgggtgaggtaggcgtaagtcatcctgcctctgtgctgttcttcttgttgtagggttacaaaggagtttgccttcttctttccaccttccagagttcttcgtttgtctcttgcagtatttgtttatatttgtgcttagtggggattaactggaaaaaatggtctgtgccatcttgtctggaccacaagctgggttttccttctaatttcagtttctgtggcatgtgagtgtgcaggtaaacaagtggagagatactcagcaacaccctgagtttggctttgttggaggccctgagatttactcacttttaaaagagttcattaaacatcctctatgcctggacttaaatttcattcaccagttcatcatagagttctggaaaattgtaagccagtgctgtcctccctatgttttctaaagccctatgctggtacagagggactttctctttagatattttcttgactttccctagtttggtctattcactctctgcctgcttcttttcatattggagtatccagtgtgaagtctcaggattttgttaacttttctttgccagaatatcttctggcctggttggggtagtattggactcactgaaaccatgctgtgaaacttacggaataaggttgtactcctttatttgttggtgatatgtttaaatttttgttttgtgttttttctttttttgagacggagtcttgctccatcacacaggctggagtgcagtgatgcgaggggggctcactgcaagctctgcctcccgggttcaagtcattctcctgtctcagcctaccaagcagctggggctacaggagcctgctagcacgcccagctaattttttgtatgtttagtggagacagggtttcactgtgttagccagaatggtctcgatctcctaacctcgtgatccgcccacctcagcctcccaaagtgctgggattacaggcatgagccaccgtgcccggccaaatttttgttttttcttaaaccctattttttttcactattgtcagtaggagcttttgaagtactgcttgatgatgagatttttgcagtttttacatcttcctctaacttttgacattgctaatgatggtggtggcagcctatctggagcagctgctgtggagacgccagctgtggctggggaggtgtggccagggctgcacccatcggggctgtgcactctgcagagccagcaggggctgggaacaggcgggagctttgtgctcctgggtgcagctgcagctgcccagctgcagcttggggcccaggaagccccctgcccctgtaggcttgaaagtgcctgctctcaccccctggcctctccctgcttctggcgcctgctccagggtggagcaaagctgtggccaagtccaggcactgttgcaacccggccaggtatgtgcatgctcagagtggtgctgatatgccagccccttgccaccatcgtcccctctggactttgggtatcgacaagcgtaggaggggggccgcaggggctgagggcagcttggcaccagcctgcaggcgcctcttgggacagtcagtttgggtgccgtggatggcatgttaaaggcagacaggttcctaggcagaaaggggtgggtccctggtgaaactttacctcaggccagcgatggcctgaagcctgggggctgggctgccagttctaggtgaagtccgtggcccagagtgagaacttcattgatgactgtttggcaaatttgatggggctttttctaggcccaccatggctgcccatggatgaatcagtatgcagttccctgattctgagcacataaaaatcccaggctcagccagacacacattaatccagatgacctgcttgcagaaaggagctacccactatgggtctcctccgctgagagctggatgcttgttgggacaacctgcctgtggaaaggagctgcccactacaggtctcctcccttctgagttgggcacacattgggacaacctgcctgcagaaaggacctacccactttgagtctcctgagagccattctgtcgctcagtgaagctcctctctgccttgctcatcctccagttgtctgcatacctcattctttctggatgtgggacaagtgcttgggacctactgaatggtgggactaaaaagagctgtaacacgagcacagtagaaacatgccctccagtcactacgctgcgtgcaacgagaaagagagaagatctgtggcccttctgggattccagagcttggggctacctgagccaggactgtgacatgctgtaacaccctttttgggactctgtggttcctggtatctctgagctttctggtgccatcgttttccccctgtccagatgctactgaagctacgtgttgtatgtctggtccaactgcagccttgcacagagccagcgcctgtgctggtgcctgcctggagctgcctgtcctgcagcagctggtgtgcctggctgtacacagtggacagatcccgcgcttgctcactcacacaccccttgctgctccactcctggctcacccttggcatgtgtgggatccaggccagtagtgtgagctgagtgcagcctgccaggctgagtggatggaatgagttcagcgggcacaagtgaaacccaagcagaggcaccactggctacagaggtttctggctggcaaagcaacaccctaatgatcctgcgacactaatatctttttttttttttccctcctgatgcctgtgactctgccagacccctgttatctttttgcttacttaatttctatcctttggttggtttctcctcctttcagtcttggactgccaggttctcatgggttttatccttgactctctgcttttctgtcaacattcagtctgttggtttcatctgtcacctttaagtaattgactcttgaatttggatttttaaccttaatattttacctaaaggtaaaacttgcagctgaaacgattatagtttactcaaagtagttccatattcttgttctttcatttctattgatactgtcatgattattgatttctaaagccttaaaaattttattgaattgtctctcttttgttcactaaatccattcactaggtcaagaatctttcattttaattcgcattgacattgtcaattctagatcttcatttctcaagctatgttggtataatggcttcttatgtcttattagctcccaaatcaaaatctatctttgtgtctctttgtccttctgtttattgaacgataacatacacacagaaaagtgtacaaatcataagtgttcagcttgatgaattttcacaaactgaccatacttgtgcagctagtaccaacaaattaatctttttaaactattgtattcatgatcttggttttcaaaaattgtaaccttgtgttaacaaaaattaatttaaggagtttgggctttattggtttcttgagcagaggactagcagaagataaattggcatgccatctcccactacttgtcacatagagtttaattttggagatgtttgctattttaactgtatctcatactcacttttttttttttgccttatacatctctatttcctgaaatacatttcccatttgactttctatattctaaatcatgatcattatttcagtcctaattcatatcttgccatttctaagaaattttctgggttattccagctttaattaacttgcagtaatatttgcaataacaacaacaaaaacccaggagatatctgaaatatctaccaacaggaattttctttttcttcttcttcttttttttttttaaaagacagtgtctcattctgttgccctggctggagtgcagtcttggctcactgcaacctccgcttcccaggttcaagtgattcttgtgtctcagactcccaagtagctaggactacaggtgcacgccaccatacccagccaatttttgtatttttagtagagatggggttttgccatgttggacaggctggtctcgaactcctgacctcaagtgatccacctgcctcagcctcccaaaatgctgggattacaggtgtgagccaccacacctggcccaccagcaggaatttttgatgagagaaaggtaaacattgttattacaatgcatttagaaacagaagtgatatttttccaagttacagaataaaatgaaccacaatatcagatacagttttttttaaaaaatgtaaaatattcgttgggtgcaatggcttgtgcctgtagtttcagctacttggaaggccgaggtgggagcattgcttgaggccaagagtttgaggtggcaatgtgctattattgtgcctgtgaatagccactgcactccagcctggacaacatagggagatcccatcttaaaaaactgtatgtatacatatatgcatacacaccacacacacacacacacacacacacacacacacacacactcttacatacatatacatatgtgattttttttctctatttggaaaactctaatttttaccatgtcttcaaataagattattgaagttagagagctaaagctcttgcttttctgtgtagcttagaggatatcagctgaattaacaagaaattcacctctggtatggatgaactagaatgaaagataaaaggtgtttttcttcatttcttctaactggctctgaaagattttactgcctgaaattctaggaaactggggtaccaaataaattctaccatcattttcaggatttataataaacagggtattttggggaagcttatgctaactgatctttagataattataagttatgctgtagtaatttttttaaacagcttttttgaactattatttataaccaaagaattcagccgttgaaattgtacaatttgtttttagtacattcacagttatgcaggcactactacaatcaatgttagaacattttcatcaccacaaaaggaaatccagcacccactaacagtcattcctaatttcaccccacatttgccagccctgatcaactagtaatctagtttatagatttgcccattttgagcatttcttattaatgaaatcataccctgtgatcttttgtgtctggtttctttgacctagtaaaacattttcaaggttcatccatgttgtagcctgtatcaatacttccttttcattgccaaattatattccattgtatggatgttgtcccattttatttatctgttcacctgttgatggatatttgggttggttctactttgcagctattgtgaataatgttgcttcaaacattcatatgcaagtttttgtatagacatatgttttcattttggtcgggtatatacctgggaggtgaatttctggatcatatgctaactctatgttttacgtttccaggaactgccaaactcttttccgcagtggttgcaccatttaatgtttcagctagcaagggatgaagattccattctcttcagtgctaaactacatgtctgtcttttttgattagagacattctaatggtgtgaaatagttatctcattatagttctgatttgaattttcctgatatattgagcatcttttcatgagcctattggacatttgtacatttttcttagagaactgtccattcaaatcctttgtccatttttttgttcgtttttcttattattgagttgtaaaaattctttatgtcctccatccagaagttccttatcatatatatatacacacacatatgtgtatatacatatatatgatatatatatatacatatatatatgatttgtaaatattttctcccattctgtaggttgtcttttcactttcttgatggtgtcctttgaagcatggaagttttaaattttgatgaaatccaactaatgtgtttttattttgtcatttgtgcttttgttgttgtatctaagaaaccattgcctaagccaaggttacaaagattacttgtatgttttattctgagaattttatagttttagctctgatacttaggtatgtcatccattcacagttaatgttttgtgtgcggtccaaggaaggcatcctgcttcattgttttgcatgtggaaatccagttgtcccagaaccagttgttgaaaagacttttcttttccaatggaatggacttggcacccatgtagaaaatcactttaccataaatgtaaagatttgcatttggcccctctagtctattccattgatttctatgtttatccagatgccattaccatagtgtgttgatcactgtagctttttagtaggttttgaaatcagaaagtgtgaatcttccaacttcgtgcctcttttcaagttatttcatgttattttggctcccttacttttctgtatagattttaggatagcttgtcaagttctataaaaaagctagccgagatattaatatggattgtgttaaatttgtagatcaaattggagaatctttcttaacaatattaaatcttttgatctgtgaacatgaatatttcaatttacttagttcttttaaaattactttcttttttgagacggagttttgctcttgttgcccaggctggagtgcagtgggcgtgattttgactcactgcaacctccacttcctggttaagtgattcacctgcctcagcctccgagtagctgggattacaggcatgcgccaccacgcacggctaattttgtatttttagtagagacggagtttctccaggttgatcaggctggtcccaaactcctgacctcaggtgatccacctgcctcagcctcccaaagtgctgggattacaggtgtgagccactgcacctggccctaaaattactttcaacagtgtcttaagcttacaagttttgctttttttttttgtaaaatttattcctaagtattttattcttttttggtgcttttgtaatagaattgttttctaatttcatttttggattgttcaatgatggtatctagaaatataatttatttttctatattgtataaatataatttattttgtatattgaccttgtaccctgtactattacttattttttgtttatattttaaattttgtggatacatagtaggtatatatatttatagggtacatgaaatattttgatacagacatgcagtgtgtaataatcacatcagggtaaatggggtatccatcacctcaagcatttatcctttgtgtcacaaacaattcaattatacagctttagttatttgataatgtacaattaaattattattgactatagtcaccctgttgtgctatcaggtactaggtcttattctgtatatattttttgttcccattaaccatcccaactttccccctgcttcccactaccctttataacctgttgtaaccatccttctactctttgtctccaggagctcaagattgtctttctgtgtctggcttatttcacttaatataatgactgtgtctggcttatttcacttaacataacgaccaccagttctatccatgttgttgcagataacaagatctcactctttttaatggctgaatagtactccattgcgtatatgtaccacatctctttattcattcatctgttgatggacacttaggttgcttccaaatattggctattgtaaacaatgctgcaaaaaacataggagtgcagatatctctttggtatactgatatctattttttttttggcggggcggggggggtggttatatacccagcagcgggattgctggattatatggtagctcagtttttagttttttgaggaagctccaaactgttctccatagtggttgtacacattcccaccagcagcagtgtttcaggattctctcttttctacatccttactatttgttttctggttgttttatggtctttttcctttcctgtcttcctgtctttcttttagggaaggtaattttctttgttagtatgacttaattttactttttttgtattcattgtatgtttttttgatttgaggttaccatgaagcttgcaaatactgttttataacccagtattttaaactaatgacaagttaacatgattgtataaacaaacaagcaaaaagaaaactaatgaaaactctacactttaactttgacccctctccgctttttaacttattgtttctattcataactcattgtactatgtcttgaaaagttgtagttattatttttgattggttcatcttgtcttttttctgaagaccagagtagtttacacaccacaattacacattattattataatgtgataatattctttgtttttttggtgtacttacttctaccagtgagttttgtaccttcagatgattcgttactgctcattaatgtccttttctttctgattgattaatcccccttagcatttccttttttttttcttttttttttttgagacagagtttcactcttgttgcccaggctggagtgcagtgatgcaatcttggctcactgcaatctccgcctcccaggttcaagtgattctcctgctgcggcctccctagtagctgggattacatgtgcccgcctccacgcccagctaattttttgtacttttagtagagacagggtttcaccatgttggccaggctggtctcaaattcctgacctcaggtgatccacccaccttggcctcccaaagtgctgggattacagatgtgagtcactgtgcttgccccctccgcacccccccccctccccgcaccttaacatttcttataggactagtgtggtgctgatgaaatccttcagcttttgtttgtttgggaacatctttatttctcatttatgcttaaaggatattttcaccagatatgctattctagggtaaactttttttttccttcagcacttcaaatatttcatgccactctctcctgccatgtaagatttccactgaaaaggctgctgccacacatgtgggatctccattggatgttatttgtttcttttctcttgttgcttttaggatcttttctttattcttgacctttgggagtttgattattaaatgccttgaggtagtctttacattaaatctgcttgttgttcaataaccttcttgtacatgaatatttacatctttctacaggtttggaaagatctctgttattatcactttgaataaactttctacccctatctctttctgtacctcctttttaattctaattactcttagattcccttttttggctggacatggtggctcatgcctgtactttggaaggccagtactttggaaggccaagatgggaagattgcttgcacgtaggagtttgacagcagcctgggcaacaaagtgtgaccccttctttacaaaaaaattttaaaattagctgggcatggtgacacatacttgtagtcccagctactcaggaggctgagacaggaggatctctttagcccaggaggttgaggctgcagtaaactgtgattgtgccactgtactctagccagagggagaccctgtctggaaaaaaagaaaaactttccccttttgagactattttctagttcttgtaggcatggtttattctctttttttgttttcttttttttttttttatgttccctctgactattttttgtgccactgtactccaacctgggagacagagggagaccctgtctgaaaaaaaagaaaaaatttccccttttgaggctattttctagttctcgtaggcatggtttattctcttttattcttttttttaattgttgttgttccctctgactatttttaaatagtctgtcttcaagctcactaattctttcttctgcttcatcgattctgatattaagagacactgatgcattcttcagtgcgtcagttgcatttttcaactctagaatttgtgcttcattctttttatttatttcaatctccttgttaaatttatctagatagaattctaaatttggtctctctgttatcttgaatttctttgagttaactttaaaacagctattttgaattctctgtgttaaagatcccatatctttcaggccaggattggttcctggtgccttaatttagtttgtgtatggagatcctgttttcctggatggtcttgaatcttgtggctgttcgacagagtctgtacattcgagagttaggtatttattagatatttattgtagtcttcacttctgtgctttgtttgtacctgtcatccttgggaaggctttccaggtaatacaaggtacttgggtgctgtcatgtaagctgtatctgtattaggggccacttcaagcccagtaacactatgatttaagtggacttgtaggggcactgcctttgtggtcttggataagatctgggaggattctctacattaccagcagaaactcttgttccctttcgttactttctcccaaacaaatggagtctctctctcttttgagtcacctggagcaggggatggggtgacacagtcacccatgttgctaccagtactggaattgcactgggtcagacctaaagccagcgcagcactgggtcatgcccaaggcccactgtaattgctacctgactcctgcctatgtttgctcaaggcacctgagctttataatcagcatgtggtgaagccagcgaagcttgtgtcctttcctcaagggtggtgagtttctgtaggctccaagtgggtccagaaatgctgtctgttagccaaggagtagagtcaaaaccttagaaatctacctgatgccctattctacagctaaactggcactcaagccatgagacaaagtctttcccgctcttccctctcctttcctcaagtagaagagcctctctccctggccaccaccaccgtaggcccacaggaagtactgccaggctactgctgatgttgacgtgaggcccaagtttccttcagtcagattgtggtgaatgctggcagtcctgggacttaccctgcagggcagtgggctcctctctggccagagcaggtctagaagtgccacctaagaggcaaggcctggaattgggggccgtaagaatgtgcttggtgctctaccccactgtgttcgagatggtacctaaggtgtaagacaaagtccccttaattttctctttgtttttctcaagcagaaggagtctctcaccatagccaccacaactgggaatgtgctgggtctcacctgaggttagcatgtctgaatctgacccagagcccacagcgtactacccgggtatcactgctggttattcagggaccagaggctcttaagtcagcaggtgatgaagcctgccgggactgggtcctccctttcaaggcagcggggttttttttggcccaggttgtgtttagaaatgtcattcaggaggtagggcctataataggcgcctaatgactgcccagtgctctatccttctgtggctgagctggtatccaagaggcaggacaacattctctttactgtttgtctcctctcctcaagcagaaggatggagtcacttttgttgctgcaagctgtgctggccggggtgcagaaggggtgttgcaagcactcctgtagcctccctctctcatgtctctctaggttgctgaaactcaagttctgactgctggaatgggcaattcccctctggctatggctggtctaaatgctcccttcctgggtgggcattggctgagttcatcctggttttgctttctgctgtgacatggcagcagtgagtttattgcaaagtcccacaatcacagtgctctctttctcctccaagcatactctgtgcaccatgtggccactgctgggtgatgggagaggactggtcttgatgattcgagactgtgttttctacccttttcagtacctctttcagcgataggaagttaaaactgggtactgtgattgctcacctgatttttgtgtgtgtaaatagttgttaaatttggttttcctgctggcagggggcagggaggcataattggtggaggcttctagtcatttattttaatggtttttgttgcattacataggattttcttcatacaagatgatgtaatttgcaaattaagatagttttacttcttcctttccgatctgaatgccccttttatttcgtttgtttcactgtaatggctaagacctctggagtaatgttgaagccaacaatagggtggacttcttcatcttgtttctgatctttggaagaaagtattcagttgtgttttttttttttaaccccaaagaagaatctatcataacttttttttttttgaagactaatttcctttttatttaagagtttttctcttttgtttacatacacagatatgtgctgattagaaggctcacttgtgcagtgtggaggataaccagtgccttacaaaatggggtttgggagtgacctgaagaattcacatgaagcagtgttaaaattgcaagactgggaattacggttactggaaacagtaaagaaatttatggccctgagaataaaaagtgataaagaatatgcatctactttacagaacctttgtaatcaagttgataaggaaagtactgtccaaatgaattatgtcagcaacgtatccaaggtaagaagaataatttcactctttgttatttataacattataattgtccttaaaatgcaatagctcaaactattgaatgagcatacttaagtcagcattctaaagcagtgattccacagttttacagagtatgaaaatctcatggagaagtttttaaaaattataaattttggagtggccgggcatggtggctcacacctgtaatcctagcactttggaaggctgaggcagcaacatcactttagcctaggagtttgagaccagcctggggaaagtggtgaaaccctgtctctacaaaaaatatgaaaattagctgggcgtggtagcatgtgactgtagtcctagctacttgggaggttgaggtgggaggattgcttgagcctgttagatcaaggctgcagtgagccgtgggtgacagagtgagaccctgtctcaaaaaacaaaacaaaaaattccctaattttttgtgcctctctgatattctgtattctatagctgtacctctctgatgctctgacttaatgggtcaggtttgagaaccattgttacaaattttggtttcttttattaactcttctggctttgggtcatttgaaccctgctatttttcccttttgcacaaactttagttataaaccactccctgaattcttctgtgaaccattagtgttgtgaatcatatggaatattttagcatgtagctcttatttgctatcatttcagtacaaaaatattagtatattgttgagttagtcactcttaaaacatccattagatgaataatgtattttttaaatccaagattattctgtcatataaaaataagggccagaattacactgttaattgttctttgaaaacattgaagaagaaatattaaactctaatagttcttggattcttgctttgttacttccagtgtcttatttaaatatcatatttcactatagaatgttaaaaaaattaatcttctttcacttttgggtcttaggatttgagtaaattttagaggaaaactctgttacctgtggagactgtgtatatagtgtgtttgatcaagtaaggagttgtgattctgttaagaacccagtaatgttcatatctttaacttcctttctgggccagtatctagtctgaaggtagagctgccagagatggccacaaaaaatacaggacaccatttgaatttgcatgcagtatttaggacaaacatacattaaaaatgatttgttatttatctgaaattcaaatttaactggatatcctttattttatttggcaatttcatctgtgggtataaagccttctattatgttaatgggaatagatagggaaagtatttttggtattttaaaagtcacattttatttaatcttcttgtttttggtaagctacctggtgtttctgagtccaaaggctttctgcttcatttatccctcttgttttcttttcttttcttttttttttttttgagatgcagtctcactttctcgcccaggctggagtacggtggtgcaatcttggctcactaaaacctctgcctcccgggttcaggtgattcttgtgtctccgcctcatgagtagctgggattacaggtgtgtaccactacacctggctaatttttgtatttttagtgcagatggggtttcatcatgttggctaggctggtcttgaactcctgacctcaaatgatctacctgcctcggtctcctgagctttaacggagtcatctgacctcataaatcttgacctcccttttgcaggacacttaggttttaacttttcctcatatgctaattagttaccacttatctgcttttcattttcttacattctgttgacatatcttatttgccattgtcacatagtttctgttttctttgttattgctaatttatacattaaattaacagttgaacaatggttgagaactcacagaaaatcaaggagtatgtcagcctttcctcttttttttttctctttaggatcttgctctggcatccaggctggagtgcagtggtacagtcatggctcattgcagccttgaccacccaggctcaagcaatccttccacctcagctttctagggagctgggactataggcatgcgccaccataactggctaattttattttttattttatagaaacggggtctcagtatattgcccaggctgaccttgaccttctgggctcaagcaatcctcccaccttggcctcccaaagatctgggattataggcatgagccactgtgaccagccattctttcctcttaacacagaaaaactatgatttattctacctataagtaaagtctaccttttaaaaagaggattgtgcttttcgtattatatcttaaaaaatctttgcctgggccgggcgtggtggctcacgcctgtaatcccagcactttgggaggccgagatgggcggatcacaaggtcaggagatcgagaccatcctggctaacacggtgaaacctcgtctctaccaaaaatacaaaaaaattagccgggcgtggtggcgagtgcctgtagtcccagctacttgggaggctgagacaggagaatggcgtgaacccgggaggcggagcttgcagtgagccgaggtcatgccattgcactccagcctgggcgacagagcaagactctgtctcacaaaaaaaaatctttgcctgatgcaaagttaaagagttttgcctgtgttatcatctggaaatttttatagttttaagttttgtttgtaggtctatgatttatttttatttaatttttgtacatgtggcaagctatggattgaagttcatatttttatctttttttgcttctggatacccatttgttctaacttcatttgttgaaaacactaagctttctccattgaattgcctttgcatctttgtttaaaatcagttaaccataatgcgagtctatttttatactctttattctgttccattcatatttttgtctatcatgacatcagtaacacatttaattatttgttccttgataataatatcaaagtcaggtagtgtacagtagtcatcccttattcatgggagatatgttctaatatccccagtagatgcctgaagctgtggatagtactgaacgtccattgttgtccatcagaatatgtttcttttcatgccttccacccacacatttaattccttttccatcttaactaagcacttatcacgtactatgcatataacttttgcagtttgaagtgcaacatcaaaaattcaaaggtgcaaatttcctttttcttctttttcacagttgcatggatagaagattcattcttactgtagctcttagcaaactcagcatatgttttttttctttccttaagttgagaactttcatcccttcacccaaaggagacactttctgtcttctttttggcatatccaaattaccggcatcactatccttgcagtttggggctattattaagttaaataaaggttccttaaacacaagcactgctatagcaaggataactgagatggctactaagtgagtaatattcaagtagcatatacagcatggatacactagacaaagggatgattcatatcctgggcaggacagagtggggaggctaggtatttcatcatactactcagagcggtgtcaccttaaaacttacgaattgtttatttctggaattttccatttttggattacgtgcaatcaaaactgcaggaagcaaaacaacagattaaggggtactactgaacttattttttttttcaaaattattttgtcttttctaaatgttgtgcatctccttacaaattttaggagcaccttaccaatcattttttttaaaaggctactgggattttgcttggaattacattgaatgtatagataaatttggggaaaatctatatcttaacagtattgggtctttcaataaataaaaatgatatacattttaaattgttaaaaaataattcaacttttattttagattccgggggtacacatgcaggtttgttacctggatatattgtgtgatgctgaggtttatggtatgaatgaccccattaccaaagtcgtaagcataatacccaatagtttttcagcctttccccccgtccttccctctcccctctaatattctgtagtgcccattgtttccatctttatatccttgtgtacccaatgtttagctgccacttataagtgagaacatggagtatttgtttttttttgttcctgtgttaatttgcttaggataatggcctccagctgcatacatgttgctgcaaagggcatgatttctttcttttttatgaccatatagtattctgtggtgcatatgtgctgcattttcttcactcagagcggtatcaccttaaaacttacgaattttctgttttctgtttctacaaaacagaaacaggtgtctgtttggtagaactatttattttcttttggctgtatacccactaatgggactgctaggtctaatggtagttctgttttaatttctttgagaaatctctagagtgctttctctagtggctgaactaatttacatttccaccaacagtgtattaagtgttcccgtctctccacaacctcacgagcatgtgttgtttttttgacgttttaattatagccattcttactggtgtgagatggtatctcattgtggtcttgatttgcatttatctgataattaatgacgttgagcattttatcatgtgtttgttggccacttgtatgtcttcctttgagaagtatctattaatgtcctatgcccactttttaatgtttttttttcttgatgatttgtttaagttctgtgtagaacattagtcctttgttggatgcatggtttatgattattttctcccattctgtaggttgtctgtttactctgttggtagttacttttgttgtatagaagctctttagtttgattaagtcccacttgtcaattttcatttttgttgcaattgcttttgagaatttagtcataaatttcttcccacagctgatacccagaatggtgtttcccaggttttcttctaggattcttatagtttgaggtcttacatttaaatctttaatccattctgaattaatttttgtacatggtgaaaggtaggggacaagtttcattcttctgcatataaagctagccagctatcccagcagcatttattaaatagggagttctttccctgttgcttatttttgatgaaagatcagatggctgtaggtttgcattttttttttttaatttctgtgttttctaatctgttccattggtctatgtgtctttttttgtaccactaccatgctgttttggttattgtagctttatagtatagtttgaacttgcgtaacatcaagccactggctttgttctctttacttaggactgctttggctatttgggcgactttttggttgcatatgaattttattatagttttttcccagttctgtgagaaatgacagtagtttgataggaatagtgttgaatctgtagattgctttgggctgtatgggcatttaatgatattgattctttcagaccgtccgcacagaatgtttttccatttgtttgtgtcatctgtgatttctttcagcagtgtcttgtagtgcttcttatagggatcttttattttcttggttaaatgtatccctaggtgttttattttatttttttgtttctcttgtaaatggcattgcattcttgatttggctatcagcttgaatgttattagtatatagaattggtgctgatttttctaatttattttgtatcctgattgtttactgaagtcgtttatcagtttcaggagccttttggtgaagtatttagggctttgtaggtatagatgcatgtcatccattaagagagatagtttgacttcttttcctatttgggtgccttttatttttttctcttgcctgattgttctggctaggacttctagtactatactgtattggagtggtgagagtgtgcatccttgtcttgttccagttctcaaggggaatagctcaagcatttgccgttcagtatgatgtgggctgtgtgtttgtcatagatggctcttactgttttgaattatattccttccatgcctagtttattgaggatttttatcatgaagcgatgatggattttatcaaacgcttcaatctcaatcatcaattgagattattatatggttttgtttctgattgtgttcgtgtgacaaattacagttattgatttgtatatgttgatccaaccttgcatcacaggaatgaagcctattggatcatgatgaattaattttttgatgtgttgcttgattcagtttgctattaatagtatttcattgaggatttttgtgtttatgttcatcatggatattgacctgcagttttctgcttttgttgtgtctttgccaagttttggtatcagtgtgatgctggctttttagaatgaattaggtagaattccctcctacttgattttttggaatagtttctgtagaattggtactacctctttgtacatctagtagaatttggctgtgaatccatttagtctgctttttttttttaattggataggttttttattactgattcaatttggagctggatattggtcttttcagggtttcagtttcttccttgatatggttcggctgtgtccccacccaaatctcatcttgaattgtaactcccacaattcccacatgttgtgggaggtgactgaattatgggagtgggtctttcctgggctgttctcgtgatagtgaatgagtctcatgagatccgatggttttaaaaatgggaactttcctgcacaagctctcttttgcctgccgtcatccacataagacgtgatttgctcctccttgccttccaccatgtttgtgaggcctccccagccatgtggaactgtaagttcagttaaatctctttcttttgtaaattggccagtctcaggtatcagcagcatgaaaacagattaatacagtaaattggtaccagtagagtggggcgttgctaaaaagctacctgaaaatgtggtaatgactttggaactgggtaacaggcagaggttggaacagtttggaaggttcagaagaagacaggaaaatgtgggaaagtttggaacttcctagagacttgttgaatggctttgacagaaatactgttagtgatatgaacgaaaaggtccaggctgaggtagtctcagatagagatgaggaacttgttgtgaaccggagcacaggtgactcttgttttgttgcagcaaagagactggtggaattttgcccctgccctagagatttatcgaaatttgaacttgagagagatgatttagggtatgtgccagaagaaatttctaagcagcaaagcactcaagaggtgacttgggtgctgttaaaggcattcagtttcataaaggaagcagagcataaaagtttggaaaatttgcagcctgaaaatgtgatagaaaagaaaatcccattttctgagagaaattcaagaaatttgcataagtaacaaggaattgaatgttaatcaccaagacaatggcaaaaatgtctccagggcatgtcagaggtcttcatgacagcccctccatcataggcctggaggcctaggaggaaaacatggtattgtgggccaagcccagggtccctgtgttacgtgcagtctaaggacttggtgccctgcatcctagccgctccagccgtgactaaaaggggccaaggtatagcttgggccatggcttcagagggtgcaagctccaagccttggcagcttccacgtggtgttgagcctgccagtgcacagaagtcaaggattgaggtttgggaacctcctcctagatttctgaggatgtgtggaaatgcctggatgtcccagcagaagtttgccacaggggtggggctctcctggagaacctctgctagggcaatgtggaagggaaatgtggggttggagcccccacacagagtccctactggggcaccacctagtggagctgtgagaagagggctaccgtcctccagaccccagaatggtagctataccgacagcctgcactgtgtgcctggaaaagctgcagacactcaccaacagtctgtgaaagcagctggaagggaggctgtaccctgcaaagccacaggggcagagctgcccaagactatgggaacccgcctcttgcatctgcgtgacctggatgcaagacatggagtcaaaggagatcattttggagctttgagatttgactgccccactggatttcagacttgcatggggtctgtagtccctttgttttggccagcgtctcccttttggaatggctgtatttacctaatacctgtactcccattgtatctaggaagtaactaagttgcttttgattttacaagttcataggcggaagggacttgccttgtctcagatgagacattggattgtggacttttgagttaatgctgaaataagactttgggggactgttgggaaggcgtgattggttttgaaatgtgaggacatgagatttgggaggggtccagggtggaatgatatggtttagctgtgtcccacccaaaatctcatattgaattttaactcccacaattcccatgtgttgtgggaggaaccccgtgggaggtgactgaattatggaggcagatctttcctgtgctgttctcatgttagtgaatgagtctcatgagatctgatggctttaaaaacgggaattttcctgcactagctctctttttgcttgccgccatccatgtaagatgtgatttgcttctccttgccctccactatgtttgtgaggcctccccagccacgtggaactgtaagtccagttaaacctctgtcttttgtaaattgccctgtctcaggtatgtctttatcagcagtgtgaaaacagactaatatattcctgattcaatcttgagaagttgcgtgtttccaggaatttgtccattcctgtagattttctagtttgtttgcatagaggtattcgtaatagtctctgaggatcttttgtttttctgtggatcagttttgatgtcacctttgtgatttcttattgtgcttattttcattttccgtctttttctttgttggtctagctagtggtctatcaaccttgtttatcctttcaaagatcaaagtttttgttttgttgtttatttgtatggatgattggatatcaatttcattcagtttttctttggttttggttacttcttttcttttgctatctttagggttagttcttgtttttcttgatcttctaggtatagtattagatcctgaattcgagatctttctacctttttgaggtggtgtttagtgctatatacttttctctgaacactgctcttgttgcgtcccagagattctggtatgctgtttctctattttcatttatttcagataatgttttgatttctgccttaatttcattgtttacccacaagtcattctggagcaagttgtttaatttcatgtaattgtgtagttttgagatatcttcttggtgttgacttctgcttttatttcactgtggcccaagagtgttgttggtatgatttagttttttttttttttaatttactgggacttgttttatggccaagcatgtggttgatgttagattatgttccatgtcagatgagagtaatgtgtattctgtgtatgatacatggaatatttcctagatttctattagatccagttggtcaagtgttgaatttcaggtcagaatttctttcttagttttctgtctcagtgatctgtctgatgctatcagtggggtgttgtgtggctgtctgtgtctttttgtaggtctagatgtattttttttgtgaatctaggtgcttcaatgttgggtgcatatattaaatataagttaagtcttcttgttgaattaaattctttatcattagtatcattattacttcttgtccatttttttttgttggtccaacatttgttttatctgatataagaatagcttcactattcttttttgttttctgtttgtgtgatctttctctaaccctttactctgtgcctgtgggtgtcaacatgtaagaatgggtttcttgaagacagcagatggttgggtttgtttttttaatccaacttgcaactctgtgccttttaagtggagtagttagacagtttacattcaatattaatattaatattaatatgtaagattttgatcctattgtgaagtcattagatgattactttgtagtttgtattgtgtggttcctttatagggcctgtgtgcatgtttttgtggtagcaggtattttcgttgttgttgtttccttgtttagaactcccttaaggatctcttgtgaggcgacctggtatagaattctgttagcacttgcttgtccggaaaatgttttattcctccttcacttacgatgcttagtttggtgagatgtgaaattcttgattggaatttcttttcttaaagatggctgaaagtacacccctaatcttccctggcttagaagatttctgctgagaagtccactgttggcctgacagatttccctttgcacatgtgatctgacctttttctcagctgcctttaagatttttttctttagttttgatcttggacagtcttgtgacaatatgtcttgttgctgttcactttgtatagcatctcacaggtgttacctggatttttttgtatgtggatatctacctctccagtaagattagggaaactttttttgtattattccttcaaatatgttttccaggttgtttactttttctccttctttctcaggaatgacgtaacttgtaggtttcgttgctttacctaatcccgtatttctcagagagtttgtttattttaaaaaattcttttttatttacttttgtctgactgcgttagttctgaagacatgtatttaggctctgaagtttcctctgaagctttcagttgtcttttgaaactccttaagtgagtttttcaactccataagctctgactgatttctctttaagatgctgatgtattccttcattgcctggattgcttttgaagtttctttgtattgaatttcatccttgtcttggatcttgttaatcattcttgtaatacatgcttttccatactttgaattttttgttttgttttgttttttagacaggttcttgctctgttgcccaggctggtgtgcagtggcatgatcacagctctcttcagccttgatcttctgggcttaagtaatcctcctatcttagcctcctgagtagctgggactacaagtgtggaccaccatgcctggctaatttttgtatattttgtagagatgggatattaccatattgcccaggctgttctcaaacttctgggctcaagtgatcctcctgccttggcatcccaaaatgctatgattgcagatgtgagccaccatgccaagcctgtgctttaaattctttatctgtcatttctgagtttccagtttggttacagaccattgctggagagctggtatgatcctttggtgatgtcactacattcacatttttcatagtgccagaattcttgtgctggttccttctcatctagaggtgctggcacttctaatttttgtaattatttttgtgcaggtaggaatttttcttttttctttcttttcttgtgatattattgttattttttaatttctcttttcctttcccctccttcctaggtagtatgtctatagagaatgttcagtaatgtctttttggctctgccgtatggacttccgttggcaggttttatactgggcttttgtattgggctttctttatatataagccagtacatagcgcttataggtaagacgtggctgtggctaacacagctgggtgtgtatacttgatcctcgcttactgagagaagctctctgttgcctcaggcaattgattgatccgtgtagtgcacagtggtctgatttccctgctcacctctccaggctggggagcaacatgtgtggggccggactgggcaggcctgcctacctgtcgcccagtggcaggcagaagcaccagcactgagggagaatccaatgggtgtccaccaagtgctcagaggtgtgcctaggaaacctcctcagccccaagttctttgcccggggagggagagttggccaaactcctaatccaggagagtgggtactccagatgcctagacatggagagtactgcagcaccacagtctctgcacaggaatggtggggcaggtcaggttgctgattcagaagagtaggtgctcccagtggagatctgctttggtgttgagcagagagggcccagctgcaatacggtgtcttcataggaagggttggatacttagtctgctgacctaggtgagcaggtgtttcagctgtctggagatctgcctgggggtgaggaagagaaggccctcctttacctgtatctttgcacagaaagggtagggtggctcatgcttccagtccgggcatgcaggttctttgaatgcctggagacctgccctggtgaggagcagagagggccctattgccccatgatctatgcacaggaagggtgggtgtgtcagcctgcttctccaggtgagcaagtgctccaagtacctggagatctgcctggccgtggaatggagagggcccttctgccccacaatctatgtccaggaagggtagggcatcccaggctgctgaaccaggcaagtgggtgctctgaatgcctggagatctgcctaggtgtgaagtggagagggcctccctgcaccaagatctgtgaatgggaagggtggggcaggtcatgctgctgatccaagtgagtggatgctccagatgcctagagatctgcctgggtatggagtggagtgggccccaaaataccatgttatattacttaattttcaaatgtatatatattttgccatggatctcttcgttactgattttaaatttaatttcattgtttttcaagaatctattttgtatcagttgaatgtttaaaaattcatgaatacttgtttcatggcccagaaaatagtttgtcttggtaaatattgcatgtgcagttgctaagaagtatgtattctgctgttgttggttagagtgttctatagatgacagtaaagtgaagatggttgatagtggtgtttaagtcttctatttctgtattagggttttccagagaaacagaaccaataggagatatatatatatgatttatcatggaagtctaaaagacacacgatatgctgtctgcaagctggagaactaggaaagacagtgctgtaattcagtctgagtctaaaggcccgagaaccagaggtacctcctgtgtaaatcccagagtaagaaggcccaaaaacctagagttctgatgctcgagggcaggaggagatgaatatctgttctagaagagagagagtgaatttgcccttcctcctcctttttgttccattaggctgtcaatagattcgataatgcttgtcatcgaatcttctggtggatcttctttactcagttgtctcattcaaatgctaatctcttctggaaacaccctcaaagacacacagagatgggtttcaccagctatctgcagttcctttgagtcagtcaagttgacacataaaattaaacatcacagtttctttactcatgtttgtctacctgtcccatcagttgagagagggatgctgaaatctcccactataactgtgaacttgcctgtttctctttggcatttattagtccatttttcttatatttcaattccctattattagatgcataaatgtttagaaatgttatatcttcttgacaaataaattaacttgtttattgggtgggaaatgtttaggatttttattttctcctcattaattaggccctttatcactgagaaattaacttaactctggtaacattctttgttgtgaaatgtaagctgtctgatattaatataaccacgctgggtttcatttggctaatgttagcgtggtatgtcgtttttcatcatatatttggtatatttgaagtgggtttttgtaagtaacatatagttgagtcttgcttggtttcctaatatgacaatctctgctatttagtttgtgtgtttagactatttcatttagtgtgattattgatatgattaggtttaaatttatcatcttaccatttgttttctccttatcctgtctgctctttttatgttcttatattcctttctcctgtttcttttggattgagcatttttaaaatgtgactatttttatctcctttattgaattattgcctataaatgtttattgtgttattttaatggttgcattaaggtctatagtatacatctataacttactataagtctgtatttcagtgatatgtagaacctcatctataataatattcttgcaagagtatacttcagtttctcccacctgttctttgtgttattattgttacagcttttaattatatgtgagttataaatccacaatacattattatttttgctgattatcttttgaataatttaaataataagtacataattctttatatttgctcattgagttacagtgtatggtagtcttctttatgtagattcaggtttctagcttgtatcattttctttctgtttgaagaacttcctttcacatttcttatagtgcaagtctattgaaaaaaatttttttttaggtttgaaagcgtaaaaatatctttatggtgtcctttgtttttgaaaacaatttttacatgtataagattcctgtttggcaatttctttacatattttaaagatgttgctgtattatcatcttacttgtgttgtttctcatgaaaaatttgtgcctaatgtttttttcctctggctgcacttaaggttttccctttgttactgatgttaagcaattcattatgtgcctttatgtagttttctctgcattttttgtgctagggtcttgttgacctttttaaacccatgggctactacagttttcatcaactttggaaagttttcaggcattattttaaataattgttttttagttctccctcttccttttatcttctttcaggaccctgattacgtatggatttggctgtttaaagttgtcttacagtttactatgctgtatttttctttcttctctgtgtttcattgtggttagtttttattgttgtcttctacttcactaatcttacttttattcaatgtctaatctgttgttaattttatccactgtatttttcagctcagatatttttacttccaacttcctttcgtaaccctattaatgaggttaactttaattctttccctgatcacttatttccagcagtgtctcttcttccctcactcctccttttctggcaacaatacttcctttcttgccaatatttaaatttaaattatgcctgtgtaccattccttcgtcttcttgtacctgccaaaactcaacttttccttttgctccacacccatactttagggtggaacaaatggagagaataaacagaaatcaagtagttgggccatttccatgttaaaaatgaacaagtcgtaaatatctctagtagatttgaattccttttatatcttgtatcttttgacttaatatatttattctttcctctagttttgtgaatatatggaatatagtccttttttggcaattactttttcattctgatccagaattcaatacacagtcacttatttcatttatttaatagttgttgtatctcttctgtgactttttatctagaatacgaacatgagaaatcacatgaacctgtgatttggtaatttttcattttttaatttattttacaggaaaggggtcccagttcagaccccaagggagggttattggatctcgcgcaagaaataattcagaacaggtccacagtgcaaagcaaaagcaggtttattaagaaagtaaagtggtgaaagtacagctactccatacacaggggagggcgttcctgaaagtaagaggagaaatgtgtccaccctaggtacaatacgtgtttgtatacaggataaaaaaagatcattgggagatgtgctctgttacaagggtttgtgataaaggattacttttcttaattactatattttgcaagaattgatgttattatctttaaagcaaaattaggaatgcttctgttctcaagatatcatcggggtattaggacactcctaagtctggatctgtttagtaaacattatcaatctgttcccttaaccataaacatctagaggctagcaatacctaactttctgggcatgcagctcagcaagtcgcagcctcatttttcctagccctcactcaagatggaatcactctagttcgaatgcctctgttatttatagttattttgaagtgtgtacattctgtctttaatcctgagggcatgtttcttgtgtggttttcttttctttttttgttcgtttgtattcctattggaggaaatagtaggagatggagacctaggtagctatctttttcccccaactacctggtttctattttttcttcattctctgagcacttgtttactttttggcataagaagatattccaatctcatcttgaatgttgctttctacattcctggaataaacccttttccctaggagtcctggtttcttttagtggggaaaatatctgaacattcaaccaatttactatatatggaattttaggtttcacagtatttgcaattacaaataatgctgcaatggataactttgaataggtgtatttttgtaacatgggtgtcttcacgctgaatttttggaaatgagatttccaggccaaaatgtaaatgtacctgttatattatatatttttgttatatattgccaatataaatataaatttatatttctagaaatttcctctgtggatcttgtatcattttgcatatccagcagaaacataggaggatgtcagcttctacttaatctgggtaacagagtttgttctcagacttttgtatttttattattctgataggtaagaaatgatatctagggtgcttttatatttctctaaaaagagttaaattaaacatctttcatatgtttaacagctattgtattgttaggacctgttttctgtgctgaagatgaattttactttgcttcttcttctttatgtaaaattatatctgtctgcatacagtcaacttctgaaatagtacagtgataaatactatcttcaaatgatgcaaggtacttaaaaggaagtattgccttaccttttaaacatgaagtgaattgaaatattggtgatgttacatataccacataggaataaaaagtaatgaaaaatgctttttgatgaatcagtctgattatttagtagtcacataatacatatataatgtaacttgagcctgtacaactagggtttcaactatatatatttttaaagcagtaatttttaagcctggctatagagccacttctgctataccaccggatttgaaaacattgaaatcttggttgaaatcatttcaacatttaaaaacttggttaatgagaggatcacctgaggccacaaattgaagacgagtctgggtaacatagcaagaccctgtcttaactaagtaactaactaactacaccaccgcccccccaaacacacacacaccacacatatatacacacatgctttaatctatcaaaaaaaaaaccatgagtttgttcccacacaattgacatattaggaacgatttgagcttaacgttaattttgcatttgtttatgtctgaaacctgaagaagcactaggtgaatgcagaaaactataactagcttaaccatgctgcgtaggaatacatagtagacacacacttcagtcctttactggctaccttcatttacctttttgttgtgagccacactcatccacatgtggcatttcaactttctgtcaaattttgaataactctcccctttacagaattcgcaagttgcaacctttctgaagtcgactttgacaagcaagcttcaggtcttttcaaaatgaagtgccatgttaatatagtagtcatgtgcttcttaacgtttaatatgtgtaaaactatgcaaagttttttctgttaggtttctgtttttaaaaaaatgtgtccctgattagtttcttgagtattatgcctttaaccccatttgtccataagccctgtggtttttattctgtaatttttgtacaatctcatggttattaggcacaaaaatattttgttacagtagagcttatacattagaattagttgtggagctttaaagtactgatgtatagaccccatccaaagcctgttaaataagaatctatggccttagagccaataattggtatttttaaaaagtttgcagttgtttgactgggcatggtggctcatgcctgtaatccagcactctgggaggctgaggtgggcagatcacttgagcgcaggagttcaagatcagcctgggcaacgtggcaaaatcccatctctaccaaaaataaaagaaaattagctgagcatggtggcctggtcctgtagtcccagctacttgggaagctgaggtgggaggatcactttagcccaggaggcagaggttgcagttagcagagatcatgccactgcactccatcctgggcaacagagcaagacactgtctcaaaaaaaaaaaaaaaaaaaaaaaaaaaaaaaaaagcttgcagttgcttcttattgcagccagagttgtgaaccactagtccagggaaaccgtgaagctttgaagaaaatgaagagaggctcttatgaatgggaagtatctaaaatttcctttgaacttgcgattgaatctttgaaaacttcagctttaggggaatttaaggagttgtcttctggatttctatattccataaagacacagagactccaaaaacattcttcttatgtaatgggcaaactcacaataaaaactgttgtttcacagaaccatttattttgagttattgtgtagtgcacagactatgcattcttcatggaatttttatgttgtatttaaaaaaattcaagcaaaaagaaagcaaacaagtagttggaggtgtagtctgcagtgaaaagctatttataacaactattatttaggtatttttcaagcttgagtcatcttcgtgatttattttcaatgttttagtataattatagctccagtagtagtttgttctttaatccagtgttgtagaataaatacttttggtataataaactcagagcacttaaattaatacctgtttatggaatactgatttacctcactacacagctgttagttcaaatttagagggcaagaaaggactaatatgcatttctaaaagttatgtattttccccttatgtgtagttttctctttttcaaaagttgcatgcagagtttactttctttatatcatgtattaatcttagtataactggtactatttacctctatagtcttcctaagcataaaataggcattgtagggtttatgttaattattttagaagcctgagatgctatttaatgtatgcaatgatctcgtttttggggtagatgagaataaaatttctgtaaattgaattattattcctcctttttattatgaaataggtgatgtgtttatttctaggaaccattttatttttggtcacaaaacaacactgccaaagaatcgcatttaagaatttagaaaattggccatatgcggtagctgacgcctgtaatattagcactttgggaggccaaggagggtggattgcttgagctcaggagttctagaccagcctggacatcatggtgaaatcccatctctacaaaaaatacaaaaagaaaattagttgggcatggtggtgtgcggtgtattcctgtggtcccagctgctcaggatgctgaggtgggagaatcacctaagcccgggaagtcaaggcttctgtgagccgtgattgtgccactgcactctaacctgggtgacagagcaagactttctccaaaaaaaagataaaaagaataaatcttttgaaatcacattttacatttcaggtaaaagcaatatttttaataatattaatattaatatacaactcagaattctgaaaaatgttctaaaattttaaaatctcaaattagtaatttgttttcctggggcattgggaaatgtgtgctgtctttttcactgtgttaaagtagtcctatttctaattatccagtgagatattggggcggttagataagatgataattttatttaattgttctgttcagggagatttgagagatgggtcattactttagttagaaaggcagttacagtgagaggcctctttcattttcatatccatagcttctcacagagcatgtcatatcaagagtgactcaccaatcttgccctacaaggacttctttttagatgtgctcatactacaaagtaggtagcctaaaggagtagatagcttttcctatggctcttcacttctaatttaatgattaagtactaaatagaaattaaagattactatgtaatttgtaaccagtttaataatattctccttagtttaacctagatagttattcttttttatttttagaaacagggtctagctctgtcgcttaggctggagtgcagtggtgtgctcatagctcactgtagcctttaactcctgggcttaagtgatcctctcacctcagcctcccgagtagcagggactgcaggtgtgcaccaccatgctcagctttttttttttttttttttaatttttagagctgggatctgactcttttgcccacgctcgtcttgaacttttgggctcaagtgatcctcctgcctcagcctgtaattccaaagtgctgggattataggcatgtcccactgcacctggctaggtagttattcttaaagtagtttgtagatattaagacctttaggttcccacactgctccctccaagcatcaggttatgtcaggtgtaacacattaagaattagttttgtatttgaatgtgagctcttccattatttaggtgtgtgactttaggcagattaatttatctgacattcaaactccacatttataagatgaaggtattttcttcatagtgttgataaaaggagtaaataagagaaggcctgctgcgagtgtgcaagaggttggtaatattaataagtgaagccccagtatgtaaaagaggcagagagcgtctctctcatttagataagcaaagttagctttaataggagtcaggttggaaagaactaatggagaccatcaattccacctgttcattctatgtgagagagaaaaaaagcatttttttaaaatagagattcagaagaaggaagtgtcttgagtatatagattagtttataccttctgggagtaagaactgagttttaatttttttcccccagaagtctatttgaggagtttgaaaaaagatagataaggcagtagatgaaaaggttgattgggttggaggaggaaagagaggactttgttttttaaaaaaatattgagctgatggggccaatgaaggataatctggaactacaggaaatagaaaataacagaacggcttgtctaggacatggaaagggaatgggaaagagtggagagcaggaatataaaaaaaagaagctaaagaagagataaaaatctcccagaatcctaactatagttcattcttctctttaaaatttccaaataggccattattgttttaacagtcctctactagagctggatcaacaaaggaatcttctctggacgtgagctataaaagtcaaggagtttgtgaggatggcactaaataaggaagtagctattaataaataggaaaagatcacaggatgctggaactgaaagggactgtgaaggtattttattcaatgcttaatttttggtaggagaaaactgctgaggttaggcgatttacttctgaagaataaaggtgactatggctggttatttttctggttactgttcttcaaaagaagaacaagaaaggtggcccttaagtccaagaggaataaaagcaattgaggagcaccaagaagctggaaaagtattgggaaagaaaaggtaatataatttcttaatttcttttctggcctgttctgtgtttagatacttagatttacctttttaataccagtagtaatatcccggtagtcatgtggttctctaacttttgagactggaccgtaactgagctaatgcagctcagcatctttggtaccagtcattagaaaccaattatttaatttgattatattggttttatttaaaaaatttagtctttgtccacatattatttttgctttcatttggattcattttggttattatattagtgtttgatgatctgagaatctgaaatacttgaaataacagagtcttaggccaggtgcagtggctcacgcctgtaatcccagcactttgggaggccaaggtgggcgaatcacttgggaccagcctggccaacatggtgaaaccctgtctttactaaaaatacaaaaattagccgagcatggtggcacatgcctgtaatcccagctactcgggaggttgaggcaagagaatcacttgaacccaggaggtggaaagtatagtgagccaggattgctccactgtactccagcctgggtgatagagtgagactacgtctcaaaaaaaataacatggtcttaaaagtttcaacctttctattgttagaaaggctttaaccaagagaaagtgaaattctgctgacattgaaggtcatacttaactcagatgattcaccttcctctgatttatcaagtaaccttagtcctttggttctttaaaaaccttcaccagataggaacatgcttataaatctggacaccaagacataaatgatccggggaaagagactagtcaattcctgctgtatttataggggaaaatttttaaatgttataagaaaaatgaagatatccaagaactcattacaatgagttataccgttgaaggagtttcatatatgtaaacagtttttgaaaattattatattatcactatgaaaattttaatatcccaaggctgacacaaatatggtagtggtagtcttgcctttttcatgcttcttgtgcttgggttcattgagcttctttgatctgtatttatttttcatccaattttgaaaaattttagccattattctttgaatactttccttgtctctccctctgtctccttagaggtttccaagtacacacatattatttttgttattaaattctataatataattattttattttttaagaaaaattatatgtatttatggtataccttgtaatattttgatatatgttgtataatgattaccacaatcaagttaattaacttatctgtcacctcacatagttattatttcttttcatgaggagaacacttaagatacgtactctcttagcaaattcaaagtgtataataaattattattaactctagttatcatggtgtacattagatcttcaggactttttaatcctgcataactgaaactttgttccctttgaccaaaatgtccccattttcttcacccctatcccctggcaatcatcattctattctctttttctgaatttgactttttaaaattccacatatgggtgagatcatgcaatatttgtctttttatgcctggctttttcacttagcataatgccctctagattaatccctgttctcaaaaatggcaggatttccttcttttttatgattgaataatattccattatatatgtgtatacacacacacacacattttatttactataatttctttatctattcatttgttgagggttgttcctatatcttgcctattatgaataatgcctgtcctagtccaagttctgttggtataatagaattcctgatattgggcattttataaagaaagaggtttatttagcttatagttctgtaggctgggaagttcaaggtcatcaccctggcttccggtgagaactattgtgctgtgtcataacacagggagaaaaataaagggaagtggacatatgcaaagagagaaaatccagggactttatagcaatccacttttgtgggaactaatccattgctacaagagctaatctagtcttgccagagtgagaactcactattctgagaatggcaccaagccacccacatagtagcagccctcatgacccaaacaccttccattaggccctacctaccaataccaccacattggggatcaaattttattttatttattttattttattttattttattttattttattttattttattttattttatttattttattttatgttattttatgttattttatgttatttttgagacagagtctcgttctgtcgcctaggctggaatacagtggcgccatctcggctcactgcagcctctgcctcttgggttcaagtgattctcctgcctcagcctcctggctggaatgcagtggcgccatctcggctcactgcagcctctgcctcttgggttcaagtgattctcctgcctcagcctcctgagtagctgggatcacaggtggcctgccaccatggccagctaatttttgtatttttagtagagacaggatttcactatgttggccaggcttggacttctgaccttaagtgatctgccccccttggcctcccaaagtcctgggattacaggcatgaaccactgtgcctggcctggggatcaaactttaacgtgagttttggtggggacaaacaaataatatgcaagctgtagcaatatgacaatgaacatgagattacaggtatctttttgttgtattgattttgttttctttggctatgtaaccagaagagggcttgttagatcatataacagttctatttttaattttttgaggaacctcgatatgttttacataatgggtgtcctaatttacatttccatcaacagtgtatagtgctccttttcttcacatctttgtcaacacttatcttttgtcttttttataatagccatcttaataggtgtgaggtgataggtcattgtggttttgatttgtagttacctgatgattagtgatactgagcaccttttcatatatcctttggtcatttgtgtatcttctttggaagaatatctgctcaggtcctttgcagattttgaaaactgagctatttttttctgtgtgctgttgagttgtgttagttccttacatatttatatcagttcccttattagatatataatttgcaaatattttttcccattctttagattgcctttttatttggttatttcctttgctgtgtagaagctttttagtttggtgcagtctcacttgtttaattttgcttttgttgtctgtgcttttggtgtcatcttcaaaaaatcattgccaacagcagtgtcagggaacttttcctttattttttcttctaggagttttatggattcaggtcttatatttaagtctttagttctttttgagttgatttttgtgtatggtctaagatagggatccagtttcattctcttacatgtggatatccagttttcccaacactgtttattgaagagactatcttttccctattgtgtattcttggtgcccttgtcaaagatgagttgattgtatatgtgtgggtttatttttctgtgctccctctattcttccattggcccatgtatctgtttttatgctagtattatattattttgattaatatacctttggaaatatagtttggaaaaaggaagtatgatgcctccagctttattctttgtaaagattgttttagcattcagggtattttatggctccataagaagtttaggattttttttttctatttcaaaattctaatgtcgttttttatcattgaaattttaattaggaattctgatagaattgctttcaatctgtagattgttttgggtggtatggatattttaatgatcattctttcaattcatgaacgtaaacatattttccatttatctgtgccttcttcaacttctttcatcaatatcttatagttttcagtgcaaagacctttcacttccttggttaaatttattcctatgtatcgtattatttttgatgctaatttgggagtgttttcctaatttcttttttggatagtttgttgttactgtatagaaatgttactgattgtttttatactcctggcaggaaaagaaataaattttaaaaaagaaaaaagaaaaacaaatgttattgatctttatatgttgattttttaatcctacaattttacagaattcacttattaattcagttttttaaaattggagagtcacaggtttctacatacgagattatcgggggacctgccccgataatcacgtaggttcttttctattttcctaagcgtcggctggcttgagaaataaaaggacagagtacaaaagagataaattttaaagttgggcatccgggggagacatcacacattggtaggatctgtgatgcccacaagccacaaaaaccagcaagtttttattagggagtttcaaaaggggagggagtgtgcgaataggtgtgggtgacagacaaaaagtacttaacagggtaatagaatatcacaaggcaagtggaggcagggcgagatcacaggaccacaggacggaggcgaaattaaaattgctaatgaagttttgggcaccaccgtcattgataacatcttatcaggagacagagttttgagatcaaccggtctgaccaaaatttattaggtgggaatttcctcttcctaataagcctgggagcgctatgggagactggagtttatttcacccctgcagtctcaaccataagagacaggtacgccccggggggcccagttcagagacgtacccctaggtgcgcattctctttctgggggacgttccatgctgaaagaaagaattcagcaatatttctcccatttgggcttttgaaagaagagaaatatggctctgttctgcccagctcaccggcggtcagagtttaaggttatctctcttattccctgaacaattgctgttatcctgttcttttttcagggtgcccacatttcatattgctcaaacacacatgctgtgcaatttgtgtagttaacgcaattattacagggtcctggaaggatatacatcctcctcagctgacaggattaagagattaaagtaaagacaggcataggaaatcacaagggtattgattggggaagtgataagtgtccatgaaatctttacaatttatgcttagagattacagtaaagacaggcataagaaattaccaaagtattaatttgggggaaccaataaatgtccataaaatcttcataatccacgttcttctgtcatggcttcagccggttcctccatttggggtccctgacttcccgcaacacaagatcctgtctattgtagacagtcatacttttctttctgatttggatttttaaaatttctttttattgcctaattgctctggctaggacttttagtatgccattaaatggaagtgagagtgagcatccttttcttttttccgattttagaggaaaagctatcagttttttaccattgactatgttagctgtgagcttgccatatctagcctttattatgttgagatacattgattctatacttgattccttgagaatttttatcatgaaaggatgttgaattttgcccaatactctttgtgcatatattgacacgatcacatgaagttattcattattctgttaatataatgtgtcaaatacaaaattattgattcgtgtatgttgaaccatgcttgcatcccagggataaatcccacttgcccacttggtcatggtatatgatccttttaatatgtatacaattttgttctctagaattatattgaggatttttacatctgtgttcattagggatattggcttgtaatttttctttcctttttttccaatttatttttattttttgtagacatggtgccttcctgtgttacccaggctgatcttgaactcctgggctgaaacggtcctctcgcctcaacctcccaaagtgctgggattacaggcatgggcctctgcacctggacagttcttgtttcttatagtgtctttgtctggctttgctgtcagggtaatactggcttcatagaatgaatttggaagtgttccctccttttcagttttctagagtagtttgaaaaggactgatgtcaattcttctataaatgttttgtagaattcactaatgaatcaaacaaaggtctgggctttttgatgggaagtgcttgattactgattcagtctccctacctgttttagtctagtcagaatttctgtttcttcatgattcagtcttggtaggttgtatttgtttttattccatagcaccttgttctttgcagactcccagctctgtctcctcaattcagggattccacagggttctgcctcagtttctcaatgttatggtggttttagaaactttttttttattctcaattcttagagacaatttaagtagcaccaaagtttactgattcaaacaatttagatattattcaatagcaaaacatttgagctttgcactttattagaggtatgttattcataattggtttatgacaaccatggactccatggttattggtctctttgaatttcgtacttgtaaaagttgggattccaacaggaaagtggaacttacatgatgtagttcaatagacaggttttaattttgggaaaatcttcaacacttttggaaaagctaaaaggaaacaggagagggagagagagtgcaagagtgagagcctgccagccttcctcctattcctcaaccctatcagaaggtaattagcaagggacagcacagataaagggctgggtttctaactgtgagcaatcaaatgatccgtaccctatatcttgaagtgtcagtcttggcactttatgtttctcttcaaaagaagaaaaaaatagtacccatttcttccattctttagtattttcctgtcaaagttctcataagttattattaatctatggttatttctcttttcttagacttaattttagcgactttatttccttttttctgtaattaagtaagctcttctttgttttatattttgtcctagaatttgactttatattatttgaatatagtgactacagggtcttgttgttcatatttttctggggtgttttcacttgtctttttgttgttgtgctgtattttatttctgtttcatacgtattgcatatagtgaagttttgtcccctctctgatttgataatgttttcctttttataagtgtttatcccattttcgtataatatttaacagatggagttagtatctttttttttttttttttttcccccaagacaggctcttgctctgtcacccaggctggagtgtagtggcaaagtcatagctcactgtaacctcaaactcctgggcttaagggaatcttccaacctcagcctcctgagtagctaggactatagaaacaagccaccatatccagctaatgtttaaatttaaaaacaaagcttttcaaatttttgattaaaaattttttttttgtagagacactgtcttgctacattgcccaggctactctcgagctcctggcctcaaataatcctcccaccttggcctccccaaacactgggattacagatatgagccactgctcctggcctcatttgtattttgtacttattttcaattattatttactttttgtactttgttaaaatggatagtgttaactttccttaaaaagcacttttgataattcaggaggtataaataggctgcttatttaaaaaccttcacttggttaactttagaaactcaagaattataaactcaaatttatacttcttgatacacaaacttaagaactaaagctatcttctgactcttctatttgaaaaggtactaacacttctttccgtcagtctctcattcttcatttttgttggtatcctgtggaatttttgtctagtctagtaaaattaaattattatcactttaatgttttgtagctcttttttcaataatgatgatatttatattccgttttgcaaattttaacagtgttttttcctgattgtattattgttatttgcctatgattaaacttttctaaaattaaaattcaggtatttttactttttaatattttttaacctgtctataactttcagcatcagtgacttcctactggtaaaattcaattgtaaggaatactattagcaatcaggtttctgtataatgaagcaattttaaggtcttcaagtggccgacaatattttgtttattaagttacaaagaattagcttgcagctgggtgcagtagcttacgcctgtaatcttagcactttgggagaccggcaggatgattgattgaggccaggagtttgagaccagcctgtgcaacatggtgagaccctgtctctatttttttaaaaaaagaaaaagaattatcttccacaaattatcctaataacaatttatctatgtcctaatcattgctatgctgtaaccaaagagctatatctgcaacgtgctatattccagttttactgtaaatatagaaatgtagctttacttttgtttgtttctttgttaagcacctattaacattttactctcctctcttttaacaaatatcccacccacccagctaattcaaggaattatatcatccaaagatctttttgtttgtgactttcaaccattccttttaggtcagtgtttcatttgcattacatgctgctctgctatttctgttattttttcagttgaagatagacctgtttactttttcttcactatcacattataatattacctaattctgtgttaaaaaaaatatttatggctgtgcatggtggctcacacctgtaatcccagcactttgggaggctgaggtgggaagatcactcaaactcaggagtttaagaccaccctgaacaacatagtgagaccttgtctctactaaaaatcaaaataattagctggacatagtggtgcatgcctgtagtcacagctccttggaaagccgaagtgggagaatcacttgagcctgggaggttgagtctgcagtgagccatgatcgtgccattgcactccagcctgggtgacagggtgagaccctgtctcaaaaaaaacttttttaagtcacttttatggcatgtatttaattcatggttttattctacattcctccttcctttttttctttcttttttcctacttcttccctctttccctccctcttgtctcaaacatcacaataaatactcaaaatattaaacatggtaccgccttcatggagcttccatttcaattgaggagacattataaaaaaccaaaccaccaattatacatatagataaataattgttttaaatgctgagaaagagtaagacagaatagcaaggattagacctataggatatttagctgattactaaaggaaggtatggagcttgccaggtgaaggtgaggaagagcttccaggtagaggtagaaactttcaggaagagattggagcttgctatgttcagcaaagtgaagaaagaacaatatttctagcatttatttagcttggtagagaacagcaatacatgaagttggaaggatagattagcagatagataatgggagacattataagtcttagaaggagtttgggctgggtgtggtggctcatgcctgcaatcccagaactttgggaggccaaagtgggtggatcacttgaggccaggaattccagaccagcctgggcaaaatgacaaaaccccgcctctactaaaaatacaaaaattagctgggcgtagtggttcacacatgtagtctcagctacttgggaggctgaggcacaagaatcacttggacccaggaggtggaggttgtagtgagtggagattgcgtgactgcactccagcctaggtgatggagcaagactccatctcaacacaaaagaaaggagtttggatttttctttaaatgaaaaggaaagccaatgtagtgttttaagggagacagttatattaatttttaaattattattgtattattattattattgctactttaaagagaatggattggaaaggagcatgagagtgtaccatttgggaggtgttgtaatagtctaagccagaggtaatcataaccttcaaaggagtggcactggagatggagagaagaagatggatttgtgattgactttggagacagaatctgaaagacttgctgatgcattgttcatggagaagggtgtcctcagattcaaaggagctgggacttctgcagaaacacagagaatgtttattagcagcgttggggtgttgggagtgagatagagccaggcttttgttaaaactagaagatgaatggaaagttctgataagaggtatgaagagttttctaattatagagcgagagttcttgacaatacaggattctatagatagtggcttgggttggattaggagatactgaggacaatatggggttgacagagtggcaatatatgctttgagaccttggacttcctgtagtgactacactgaacagggcttttaggcaggttgggatgtaccattctgggagaggagggcaatctgacccaattgtgtggttttttggcttgcaagaaatcttctcgcctaggctgcaaggactgctacatagaattacaaaaagttattgctacaaagcacttaaagaatatttattttttgaagatacagcaagaagactgtctcctctcactttttatttttttgtagcattaacattctacacatgccatagaatatttctccaacactgcatagtttgaagtgaaaatactagatgaaaaaggcaaagctacatatattatagccatttagtttatgtttttaatccatgtttatatagttttatactgtttgcatctttgttacattttagattttaaagtaaggactacattagttttaaattgctttgtggtgttaagagcaaattagtgattatattttcatatttaaaagtaaatatgatgggtttataggccgcacatatgttccatgttcatcatatcatttcacaactaaaaatagtcccctccctaaaaaactgttctcaaaggttattattttttaaaaaacatacaatgcagtgtatcaaaaacaagattggcaagtcagatcctggcaactttgtattatgactaagaatttgctttctttaggctataattttgctttagatgcttatgaaattttgatttttgattacattggaatattaacagaaggaaaataattctgttcattcacagatcaaaaataatagagtagaaaattattcttgtcagtatctgaaaccaaactttgctcatttaaaaaatatcttttggatccactgtgtcataggtcttcaatattgtttctgaatagaatattgaatactatagcgaagaggattcctctgttccttttttttttaaaagtatgtgtatgtcaggaagtctaactaataaatgatttgttcttctagcagtttccatatgcccactgatcccaaacctacaattatgtgcctcttgctattgaggcagtgtgttgtgccctttggtgtattgtgctggaagaactattgagatgtaaaggtatttgttaggaaaagaatagagctatagatagaaatccatacaataccagtattctcacaggcaacaaaagaacaggtaccaaagattgaaaaggaaattttagaaagggaggaaaacaagccaggaattttggaaataggaagctaagcgagcctccacaaaagacagtttcagagtgaagttgagtcagcaggatcagatgccacagagagatgcaggttaagatgtggatgggacaatgtctgttgcatttgaccattaggaactgaagaccatagtgggacattagaatcatgtggcagagcagtatttcagtgtgctggaaaacaaatgagaagtgaacaaatgaagactgcaagtgtggactcttaaagagtcccgtaatctttttcttagttttctgtgttgtctgtgattatagaattttgaagcatgtgtagttgaagttgaagacgttaaatatgaaccattcatagatctttgaacagttgccagaaacctattttttatattaatgtaataatttacataaaactaaatatttaaagttttgaactcttaaagcacagctaaatggaaacctttaatgcaaatgtttgtttcttttttttttttttttaagtcttggctacttatgattcagcagacagaacaacttagtaggataatgaagacacatgcagaggacttgaactctggacctttacacaggctcaccatgatgattaaggacaagcagcaggtgaagaaaagttacataggtgttcatcagcagatagaggcagagatgatcaaggttcgtttttccatattgaagttctttcttgaaattgttttccaaattcacagaaatattttaccttatttggctttaaaaattgtttattcatcatttcccaacaagaaataggtttatggtctctaataagtaatatcttattgaacataaaacattgattataggatatactgtgactgtatatactcctatgaaagaaaaaagaggctcccaattaaactatgacacaaagctttcttatcacttaggatttttagtttttatttactgaaatagttctttgagacttttaaaaataaatttgtcttatctaatactttgcataaataaaaaagaaaatacaggcagaattacttttggtattcttaaatttacgtatccctcattttccctacattcggagtctgtctcttctgaatgacttttttcaaattatttttattatagaaatttgtaaatgtataaaacaagagaggatagtaaaatcaacttccacctacccatcacctgaatagtcaccgttttttctatactcctacccactttttttttttttacattggatcattttaaaggtatcattttatccataaatattttagaatgtatagctaaaataagtgatcttgttagaaatgtaactacaggccagatgcggtacctcacacctgtaatcccagcactttgggaggccgaggaaggcggatcacgaggtcaggagatcaagaccatcctggctaacagggtgaaaccccgtctctactaaaaatacaaaaaattagctgggcgtactggcgggcgcctgtagtcccagctactcaggaggctgaggcaggagaatggcgtgaacctggaaggtggaggttgcagtgagcggagatcgcaccactgcactccagcctgggcatcagagcaagactccgtctcaaaaaaaaaaaaaaaatgtaactacaataccgttaatttgcctaaaaataataattccttcatgttatcgaatactttttgttgaaatgcttgttgtttaaatgtttttttatagttggttggtttcaatcaggatccaaataccatctataccttgcatttgaatgatacttttaaaaaatatgtaggttctctttcctgcacagtgtttaataaaatgccatttatttatggaagaaactaggtaatttgctctatataattgaattttcttcatattgggtttttctgttagcatcttatgatgtgatttcacatattccttcatctttaattttttctgtaaattggaatttaaatctagagacttgataagattctggctgcatattttgggcaagagtacatcataggtggtggtatacacttcttgcagttttatatcaggaggtatataatgttgatttatctttttattatgtgaaacttgactaattggttccagtgttgtcaacctgatcaatctattaaaaaagttttctggctgggtgcggtggctcatgcctgtaatcccagcactttgggaggccaagatgggcagatcgcctgaggtcaggagttcaagaccagcctgggcaacacggtgaaaccccgtctctactaaaaatacaaaaattagccaggtgcggtggtgcacgtctgtaaccccagccacttgggaggctgaggcatgagaattgcttgaacactggaggcagaggctgcagtaagcctagatcatgccactgccctaacagcctgggcaacagagggagattctgtctcaaaaaaaaaaaaaaaaaaaagtttggtatcagacttttaccaaatagttttacaaagttaaccagtgagttttttcttgaatggagaatgatttgaactcatttatatttatattttttgtttattcacacagtgtcatcgtctgtgtcatcaagaacattggtgatacagaatttctttaaaaggggtttgagattatcttccaagttgctgataaccacttttgcaaggttttgatgctttctctttcttaatcttctcaaatggcaaatttgaagatctgtagacaatatctgggacacatattttttccttaaattgcattcaaatgactttttgactacagtcaaggacttgcatttgtttcattgttccacagaaataatattttaatggtttgtttaattacagaaaatatttctgcacatactaagttaatttttttaaattttagataatggcagtgttatttcttcgtttgcgccacccccccccccccactttttttttgagtcaagtttcagccaggctggagtgcagtggtgtgatcttggctcattgcaacctctgcctcccaggttcaagcgattcttgtgcctcatcctcccgagtagctgggattataggcatgcgccaccatagcctggctccttttttggtatttttggtagagacagggttttgctgtgttggccaggctggtcatgaattactgaccccaagtgatctgcttgttttagcctcccaaagtgctggttacaggcgtgagccaccgtgcctggcctgatttgctattctcttaaaaaagtttatttgttttcacatgctattgaatttagtactgatttttaaaacatacttgtagtttattttctatagttgtatattaaaggacaactctgacctgtaagtagtgaaatacacatcagttaatactttggaatttaagttcttgagcaatttaaatttaaacaatttaatacatttatgcattttgtttctttgacaggttaccaaaacagaattggagaagttaaaatgcagctatagacaattaataaaagaaatgaattctgccaaagagaaatataaagaagctttagctaaaggtaaggcaaaattttaaaaattgtttacttaggtgatttttattcttactgtttgaaagttatctttgtaagtagtggaatgattccatttagagcatttcacatataaaaaactcaaaataaacccacattggctaattgtcaaacagtgtagtaagtcttactaattttccattgctttaaatgactcaaagtattttcgaatagttcatactaaatggaattatgtagcatgtgtaatagaattgaagggatgtttaaaattttctctcttgcatcatatttacttatttaattacagagtgcttaagtaagaaaaataggagtatatttatttagaaacttttaaaatcttcttttttacctgtattatttaagtcattaaaaccacatcattttatagcattatgttctctttatagcttaattttatgtgtctatattgccctaaaattttcataagaagtcttaaaaataaatggaaagagaagcatattatttatgtttcaaacagagatttatggttataatttcttattaagtacttaggtgatcttgtatctaaattttgaaatgttagatttcagtaaagactaagcatagtttatgaacagaaacttctttggctgttgctataattgggcaatattttccttatgtttaaatgtgcctaaaccactcatatttatacattttttctttatgaaagttggaggatttttctttttgttttgttaattttctttctagctaaataaagcgtttattagaatctctattttattttggttcttaaattcatctttctctacattttctctttatctttcatttgttaaacattctcgttattttgtcatagtaaatgaagtaaacagctcctccatttggctgtatcttgcacaatgaaaatattgttgttattcccagtacactagaagtgatactgatttaaatgcagttctttctcttctccttcctttctctctccttttcccctcttctttatcttcttccttcctctcccttggactccctgtttgtcccccttctctctcttcctcctccacttcttaccccaacatttactttgtgtctccttctctccccgcttcccccaatttactagggaagttgtatgcatattcacagtttccttacttatttgtcatgtaactcagccaagactttgagattatggtctctattaatgtagatatatcttttgaaatgcttttatctttaaattatctaaattattttagtgaagcaaagaaagaaatgacagtggaaagagcacaggctttggagtcagagagtcctggatttaagttccaacattgtgtgattatttcatagattttcaaacttcctatacctaattattattcctttgttattttaggagtgctttagataaccaagaaatatttactgggcacttgctatgtttaagttactgagattcaaaacaatatttgccaggcattcaaggagcttacagtctggttcactaacttgagaactccaagtctcactctcttgcaaaatttagctttttcacaaggtatcccttgctaaatcatcaagaatagtttaaaaataactttatacattaaacattacttcttaatctgtcaaaatagttaattttataaagttcattgcttcatgcctggctagcattctcaagttaattaaattacattgcaaatatccatatctaacttcacccacagcaaccatattgtaatccagctatgttgtgtatttcgcactaggtttgtatatgttggagaattattagttagaaaaagaaatacataagtactttcaagtctttgatatctgtttttagtgatacagtttatttttttaaaagcaaaatctaattctgatgtcaaagttttaattgttgtacctaatgcttatattagaaaagattatggaaaatcattattctttactcttgattcagatgaaacaccatttagtattgtattaatagttggaaggcaacgagagaatctgaagatcatacttgtaataaattgtaagaagtgaattatttgaatctttttttaaaaattatacaagcttagttgtctttctaaaggtattcatgatagtatttttctgttttcaagaatttgatttctcacattaaatcctacagaatatatagttacttttaaaataagtacttttatatatccacttcacacatgagagataggtaaacttttcttttataatcaaaactgtgtttatactcatatttaaatgaaaaagtataaaattttatttttgaaaaatttatgtttcaaactgcttctgtttttatggaaataggagttttgtggagttatttactctttacaaggatgatgagctgtaatggcaaatttttccaacatatataggctttatgtcagaaccttagttcacctacatgggccagattaggacacttttggaatgggccctagagactgcggggtgcttacaatagctactcagatatttgtctggcatccagagtcattactttagacattggaaggtcttagaaaagttatttacaatcccaatctaacatagagcatccaattagagaagacaggccttggggaaacaaggcctggaaataattcctatagtaagataaattctatatttgatcaagaaatgggtttggactcaagggttcagttcctataactgggagttcagcagtagtagtagtagtaaaccagcaggaaggctgagttaatgctgaaactacaaacccctgacccctgctgtataaattaaactgatattttaaattttgaatgttaaaatttatatacaaaggaacactcgtttatgtttagtataatgtaaaatgtaacattcatttacaatatgaatttagcatcattttaattttctaaaaattaaatgcaccttaaaataatacaccttaaacattctaaaataatacaccttaaacattctaaaaataatacaccttaaacattaaatgtgcattgctgtgtggtatgttgagggagcacatgtatattgcattttatcttaaattgacttggactaatttgaacattagttgattgattattacttataatggatgctgaggacaaccaaaataattttaacctattgagctgaagttaataacttggaggtgtttctttttttttccttcattgccttaacaaacatttagatacaaataccctttgatacaaagaagtacaaaaggtagtaaaggattcccccactgttaccatcactactaaacacatacatatccacagctgttcatggcccatgtcagtgcctcttatagacgggaaatcacctttactagatttaataaaaatgcaaatgcctctaaatgttccttcagaataagtaagaagagctgaccaagaagaaagaacaatgggtgaaggattgtggctcccacaaatcaggtgaaggtaatagtttggggctagccaaaaatgaaaggaatcctaggtgattgtcaaatcaaaagttaaaaggaaccaagttagtccaggtaggaagagaagattttggggagttaggctagtcaagtgcctgtaggctgcttaaggaagtctgctctgagtgaggagaagggaatggaaagtatctgtaaatatccaatgggtttttaaaaagaataagtagagcaggaagcagaaagtagccacagagaaattcttcctaccccaaccccatgccattttctttttttttttttttttttttttgagacggagcctcgctctgcctcccaggctggagtgcagtggcgctgtctcggctcactgcaagctccgcctcccagattcacgccattctcctgcctcagcctctggagtagctgggactacaggcgcccgccatcacgcctggctaattttttgtatttttagtagagatggggtttcactgtgttagccaggatggtcgcgatctcctgacttcgtgatccgcctgccttcgcctcccaaactgctgggattacaggcgtgagccaccgcgtccggccatcccatgccattttctaaaagtagttaatcagattctttatcgggactgactttaatttacacaggttgaaaaaaatatctactcgtccagccccaacaagcagcctctcattttattttttccaacctttaaaaaaaaattaaaacaaacgtagaaattagaaggatgggacagtgaatatgcatactggattcaacaagtattaaccttctgccacattggcagaatcatttgaatgtatgtttcaggcgtcatatactcttgatcggtaaatgctttagcttgcatctgctgagaataaagacattcttctaaaaagccacaatgcaattatcatttctaataaaattaacaataaataattctctattatcatctaatatccggtccatattctggtctccccagaatgtctcttatacaggttggtgtaaaagtaatagctattttcaccattgaaaataatgtcaaaaaccacaattacttttgcaccaatctaatagtttttatttttttctgtccatcatttccttcgttgttgttgctttgaaccaggatctgatcaaagtaaacataccacatttgattgttgtgtctgtagactcttagtcttttcatctagaacagtcctcctactttttactcatgactttttttttttctggagtccagttttcttgtaaaatttctcatatgctggattgtctgattgcattctcatgactactgtttaacttgtccctgatctatcccctatatttcctgtaaatttaaggatagttctagaggcttgattagattcaggtcaaacatttttgacaggactgcttcatagatgacgatgtatactttatgttgcatcctaccaggaggcacataaagttggcttgtcttactcttagtgctcagtcaagtttgatttctttagtcaagtagtgactgccagatctctccattgtgaaggtacctttaccccatgtaattggtaagtaactgcagagagatacattggcatgtgtgaataacctatcccccaacaaccttctatccaatggcttggcatccattgatcatccttgccagtagcaatattacgttaacagcccatcatttgtaaaatgcctagcagatgactgggaagagaaaggagggttgagggaagaaacagagaacaatgtaaagagggaataaaaagctggaaatgggaaaacaattccaaaagctttgctgatacccttctctttttacgtttaactctttccaaagtcatgaaccctttaaggtaatgctggcttgaagcagtgagcaaagaaagcctcttgctcagggctgtcactttactaggtagtgaacgcatttcagttagaagtgtttcttgacatcagcataaaataacaggtacttaaatgcaaaatacacagattttaccttcctattgaaggttaaattccgaacacctttagtgggttaaacacttggttaggtttagccataaaacagttttgtgaatccataaagcttgtatctgcactaagtagtataaaggaaataatatatttttaaaaacttttaacttgtatatattaggaaataaataatactctgagatttatctcttaggagacatcgagaggtttgttgggggctctggcaaatatggggaattcaggtactgtttgccatgatgtgccttaacaactccctttgactatcatcaatgctgttgttgttcatgggaaataattctaatgtgggttttagtctgttaattaattttaaaaacatgaatagtgaaggtttgtgtcaggagtaacaaagtagtatttaagctgctgaacctgcagtctgttttgtaccatcaggtgagagtgagagccaagtgggaggtctttctggaccaatggtgtgcaaaatactcagtcttcctttctttttttcctatgtcttatcagtgaagaagtgatggatggttgtgggaataaattatgttgtaagtacctgggatttgtaaggattagtatttttgtatgtatttatatagatgctgtttaggtccttttttgaaaatcaactattaaaattatgagataacctgagaaattttacccagacaggatatttgatattaaggaaatcttgttatattatagctttgataatgaaattgtgatttttttgatgttctctttatttttgcattaaatgcagaaatattcacagctgaagtgatgtgatatctgaggtttgcttcaaaattatctaaagaatagggagtagatagatagaagtatagatgaaacatgattgatcatgaattgatgatcattcaaaccagttgataggtacatggagatattgaacaattctttctacttttgtataggttggattttttccacaaaaattatataaaaataaagaatgtcaccataagaaatgaaagaaaactagacattggcataggcaagtatttcatgaccaaaaactcaaaagcaaatacaataaaaacaaagataaatagctgggacctaattaaactaaagagcttttgcacagcaaaaggaacagtcagcagagtaaacagagtgggaggaaatcttcacaatctatacacctaacaaaggactaaaatccagaatctacaacgaatcagtaagaaaaaaaactaacaatctcatcaaaaagtgggctaagcacatgaatagacatgaatagacaattctcaaaagaagatatacaaataggtaacaaacctatgaaaaaatgctcaacatcactaattttcagggaaatgcaaatcaaaaccacaatgtgatacctccttactcctgcaagaatggccataatacaaaaacaaaacaaaacaaaacagtagatgttggcgtggatatggaaatcagggaacacttctacacggctggtgggaatgtaaaatagtacagccactatggaaaacagagtggagattcctttaagagctaaaagtagaactaccatttgatccagcaatcccactactgggtatccacccagaggaaaagaagtcatatgaaaaagatacatgcacatgcatgtttatagcagcacaattcacaattgcaaaatcgtggaaccaacccaaatgtccatcaataaacaagtggataaagaaactgtggtgtatataagagtgtatacagagtgctcctgcctcacactcttcccctcaaatcccaaagtccactgtattattcttatgcctttgcatcctcagagcttagctcccacacatcagtgagaacataactcaggttttccgttcctggattacttcacttagaataatagtctccaatctcatccaggtcactgcaaatgctgttaattcattccttttttatggctgagtagtattccatcatctatctatctatggaaaacaaaaaaagaaatgaaagaaaggtctcagatgatccttattggggcaactatttcaatatcaaattattctgaatctattccttatcattttatatttatatatgagtacatttatgtattaatccttcatttaatcactcatttaataagaatttcttttgtttggtaaatgccagagatataaaaatgaaaaagatgtggaccctaccttcaagccattgaaagttgaatttttttttttttttttcccaagatggagtctcgctctgtcgccaggctggagtgcagtggtgtgatctcgggtcgctgtagcctccacctcccaggttcaagtaattctcctcctcagcctcctgagtagctggggctacaggtgtgcgccaccaaacccagctaatttttgtatttttagtagagatggggtttcaccatgttggccaggatggtctctgtctcttgacctcgtaatccacccacctcagcctcccaaagtgctaggattacaggtgtgagccaccatgcctggctgaaagttgaaatttttataaaatcaaatttttacctaattaaaaaaaatttcaagcccgtagaaaagttgaaatgataacataatgaactcctgcatactttttacctggattcaaaaattgccaaaattttgtcacggctaggcttctgctgtctctgtttcgcctctttctatgtatatatatatgtgtgtgaacatatatatgtgtgtgaacatatatatgtgtgtgaacatatatatgtgtgtgaacatatatgcgtgtgaacatatgtgtgtgaacatgtgtgtgaacacatatatgtgtgtgaacatatatgtgtgtgtgaacatatatatgtgtgaacatatatatatagttttcttttgatgaagcacttgaaagtatattgtaacatcataacatttccttttaaatacctaagcatatattttctaagaactgtattttccaacacaaccctaatttaatatgcccaagaaattaaactttgatacactaaaaaaattaaatatataatctgttttcaaattcattacaaaaatgtcctttataaccttgtttgttttggatccagggtccaaataaaggtttatatattgtgtttaattgccatgtagaagaattgcccttaccctctttattttttaacaggttcattttgatacagttaacatacaacagacagcacctatttaaaatatttattttgataaattttgacatatgtacacacctgtgaaattattactacaatcaagataatgaacatgtctttcacccctgaaaaattcctagtgcccttttgtaatccctgtcttccacctctctgtgatcttccgtcttctatctcgaggcaactactgaactgccttctgtcactgtatagtttggttttcatttcttagaatattttaaaaaggaaccatatagtacacactctattttgtctgccttaatttgttcagaatagttattttgaaatccatccatgttgttgcatgtatgagtaattcactttttaaaattgctcattaggactctattgtatggatctactacagtttgtttatccattttcctgttaataggcatttgggttgtttccagtattgggccattacaaataaaatgacatttttggattgttcattgctggtgtgtgtgtgtgtatatatatatatatatatatatatatatatatatatatatatacatatatatatatatatatatatatatacacacacacacacacacacacacacacaattgatttttgaatattaacttttatcctatggacttactgaacttgtttattaattctagtagacttttgttttgttttgttttgttttttttacatggtgtcttgctctgtcgcccaggctggagtacagtggcaccatcttgggtcactgtaacctctgtctctcaggttcaggcgattctcctggctcagcctcctgagtagctgggactacaggtgcctgccaccactcccagcttattttttgtgtatatatatttttccagtagagatggggtttcaccatgttggtcaggctggtcttgaactcctgacctcaagtgatatgcctgctcggcctcccaaagtgctggggttacaggcatgagccaccgtgcctggcctctagttggttttttaaaaatgaatttcttaggattttttacttataggatcatgttatctatgtataaagacagttttacttttaccttttcaatctaggtgacttttttttctccttctttttctttttctttttcttgcctaattgccctggctagatcctccagtatgatattgaatagaagtgagaggagcaaacaatgttggcttgccttgttcctgaacttaggtgtaaagcatttatttagtctctcaccttcaagtatgatgtttgctgtagttttttaaagacttaaaatcctactgaagtaatttttctctattcctgtgttagaatggatgttggatcttgtcaaatgctctttctgcatctattgagataaatagatacctattttgtttgttaatatggttattttgattgattttcacatttcaaatattacaccaaccttgcataaaatctcgctagtcatgactaaggatacaattttcttagtcatgatgtattactactttttaaattgttggatgtgatttgctaagtttttgtttataatttatcacctatgtctatgtttcttgtaatgtctttgtctcattttcatatgaggataatgctggcctcagactgattaccttctcaccaattttctaggaagatttgtgttgagttagtattatttctttcttaaatattggtagactttgcttgtgaaaccatctggatctgcttgtttttatttttcctttttggttaagcttttaaagtataaattcactttctgtaatcaatataggctattttagcccagtatggtggcatgtgttggttgtcccagctacttgggaggctgagaagggggaggatcgcttgagcctaggagtacgaagttatatgccattgtactccagactgggtgacaaagtgagaccttgtctctggaaaaaaaaagaaaaatgaggctacttagtttgtttctttttattttaggtttggtaggttgtcttttcaggaatttgtccatttcatataagttatagaatgtattgatagtaatttgttcataatagtcctttattcacctttttatttatatattttttatttatttattttgagacagtcttgctctgtcacccaggctggagtgcagtggcgcgatcacggcccactgcgagctctgcctcccgggttcacgccattctcctgtctcagcctcccaagtagctgggactgcaggcacctgccaccacgcccggctaatttttttgtatttttagtagagacgaggtttcaccatgttagccatgatggtctcgatctcctgactttgtgatcttcccgcctcggcctccccacctttttatatttatagaatgtgtagtgacatttcctttattagtagtttttctcttgtttcctgatcattgtgactagaggtttatcagtcttattaatcttctcaaagaccagcttttggtcttttttcttctgtttttgtgatttctactttaacactttctgctttgtccttatttccttccttctgcttgctttaggcttagtttgcactttttctgtttttcttaatgtggaagctgaggtcattgatttgagaaccatcttcttttcaaatgcaagcatttggtactctaaagttccttaaatactttttttttttgcagtttgccctcaattttatatattatgttttcatttttattccggtcaaaatgctttctaatttcctttttgattatttttttgtgtgtgtttttctttgattcataggttatttagaagaatgttgtctagtttcctaatgttttatcgtttttctagagttttttaattttttaaaatttaatttcgttgtggtctgagaatgtttttatgactttatttcttttacatttatgtaatagtttattatggccagtaaatgtctgttttggtaaatgctttatgtgcacttgataagaatgtgtattatgctattgttctttggagtgatctacattgtcaacttggtccagttgtttaatagtattattcaaatttgttatgttcttaacaatttttttgtctacctgttgtatcagttattgatggaaggatattgaaatcgccaaccataattgtggatttgtgtatttcttcttgtagttctatcagtttttactttatgtcttttgaaactattattggtatgtaagcatttatgagtattatattcttttgatgacctgactactttattattatgaaatgacctttattatgcctggtaataatattgtttgctctgttattcattccgtttgatattaacgtagccattccagctttcttttgattagtgtttatgtagtatattttttctttttccttttttactttatattttattttttttacaacagggtctcactctgttgctcaggttggagtgcagtggtggtgcgatcatagctcgctgcagcctcgaactcctgggctcaagtaatcctcctgtctcagccaactgtgtagctgggaatacgagcatgtgttgccatgcccagctaactttttatagagatggggtttcgccatcttccctaggctaatctcaaacccctgagctcaagttatctgcctccctgggcctcccaaagtgttgagagtacaggtatgagccaccacatctgacctatctatattcttttttcatactttaaccagtttcagtctttatttctgaaatgcatctcttgtaaacagcatatagttatctcttttgtttcttgataatccttaccttttaattagtggcatttagaccaatatttaaatgtaactgtttataatgttaggtttaatctgtcattttgcagtttattttctttttgttccacgtattctgtatttcactttgcctttattctacctttctctggattaattgaacatttttctgaagattcttatctcttctgctaatttgttagctctaatgttttattttattttgtatgtaatttactataatatacctttaactggtattatgccactttgtatatataccatgtatatagtatgggaatcttacaataggatagttctgtttctccctttcctgtctttgtgctattattgtgatatattttatatattttacttttgcttatgttacaaactacacactacattgtttttgttttgtttaaatagtaaattatcttcaataataaaatatttcatatatttatccaagtacttatcttttccagcattctttatttatttatctatgtctctatttctatttggtatcattttacttttgcctgaatggcttacttttaacatttcttgtaatgtaggtctgcaagtaatgaattatgtatgtccgaaaaaatatttatttcactttcattttaaaatatattttttgggagtatagaatttttttttaaacagatttttacctctttatgtatttaaagatgtttctccagtgccttgtcacggagaaatctgctctaatccttatcttagttgctctgaacatttcattttcctttggtagcttttaagattttccttttatcattagttttaagcaattctatcatgatttactttgttgtaagttttttattaaagttttaatttatgtttgtgttttttgagcttcttgtatttgagtttttagttttcatcaaatttggaaaactttcagccattatttcttcacatatattttctgtctccccttctctttttgctttctttcagagactccagttacacatatattaggctgcttgtagttctcttacagactcctaatgctctgataatttttttccccttgtcttttttttgtttcattttggttagtttctatgactatgtctaacagtttagtaatcttttcttctgcaatgcctaattgcctttaatcccatctggtggtggttttgttgttgttgttgttgttgttgttttgttttgttgttgttgttgttatctcaggcagtataggttttgcctcctcaagtatgatttgggtctcttcttaaaccttttatatatctacttaactttttgaacatactgaataccactataataactgttttgaaatccttgtcacccagttctaacatctgtgtcagtcactttcagttgattgatttgttccttcattttggttagatatttttgcttctttgaatgcctgataacttttgatgagatgccatacattgtgcattttaaactcattagactgggtctcattaacatttctaataaagctataagacttctagtccaaggagaaaatgtagaacattgccttgattcatgacagagagaataataataaaattttgtttgtgaaatgatggaagtttaaaaatcacattattagggccaggcgcggtggctcacgcctgtaatcccagcactttgggaggccaaggcgggtggatcatgaggtcaagagatcaagaccagcctggccaacattgtgaaaccccgtctctactaaaaaatgcaaaaaaaaattagctgggcatggtggtgcgcgcctgtagtcctagccacttgggaggctgaggcaggagaattgcttgaacctgggaggtggaggttgcagtgagcctagatcgtgccactgtactctagcctggtgacagagcaagactccgtctcaaaaaaaaaaaaaatcatattattagtgccttttttgagcttgtttttttttcctcttgaaatttataatgatcctctactgtttttctgtatgatatctataatatacttttccatgtgtttattttgtttcataaattaatctgaggattccagttaaggtgtttctgatttttcttctgcataagttaaataattgaagtttttgtatactatacttagataatccttttgtagtacttgatttttcaagggattccataagtttaggtttatcactgtacacctttaagtaatttgtcgttgtgcttgatttgtcttttgatctcatgtgaaatgagaaaaaattttatataaaacttgaaggaaaatgtgttatctctttttttaagttggaatactatttgtttttctattagaaaacattaaacttttaagatttactttttattttttttcttgtcaagggatttctgaagaaatgctgcaaagaatatctgtgtattctgtttattacagtaattttgtttatttagggcagatcataattgattttactacaccgttattttacagtattcacaaaaattaataatggtcacttacaatgttagatagtttctctggaaatttctcatagacaaacagttttcaagtacatgattgggagaataaagaaatagttgaaaccaaatctgtctgatttcagtgtccatggcctttgttggttttgcttcttcctatgaagaacatgaattaaattaaactctgttaatgataatgaaagaccaaaacacattaacctaagttttagagtcttagtggagtttatcatccttcctaatttgttctgagagttatatgagtttatttattcccagatattttgggctcaccatttcctcaacttgttcatgttgtagataatatacatcattgtattaatctgttttcatgctgctgataaagactgggcaatttacaaaagaaagaggtttaatggacttacatttccatatgactagggaggcctcacaatcgtggcagaaggcaaggaggagaaagtcatgtcttacatggatggcagcaggcaaagagagagattgggcagggaaactctgccttataaagccatcagtctcatgagacttattcacgtgagatttattcactatcatgagaacgccatgggaaagacctgccgccatgattcagttacctcccactgggtccctcccacaacatgtgggaattcaacatgagatttgggtggggacaaagccaaaccatatcagtcatcttcacctatatatatacacatgcaggttcttgtgcggatgccatgtagtactttgttcaaagtaaaaaaaacaaaaacaaaaattaagagtaaatataatgcatgccaattttataatatgtaagcaaaaccatatttaattgtatggtattgaatttaataatttcaaatgtgatttttctttgaaattttatagtttacttaaagatattctgaagtatcagaaaagatgttaaaaataactaccttgtaattatatattcagatatagcctacttaattgattctgtatgtttagaattatgctagggttttatgtttaccaagcctcaaaatacccatcatagtatttataaaggctttctcttacatgagtaggagtctgaatgcttctgctttatcatacatcatgttcaggaaaaagaaagaaaacaggatagctactccacattacacatgcccatgtcagtcagtctagaggcacttgaaaggagttctcttcaccctcttttatcacacaagtggggaaacaaactatcttcctaattatcctttctctatgataaataaaagaatgctaagggatgggtaaacccaatgataatttataagccgtcatttaccctaagcagacagagtaagaggattacctactgctagaactgtggggagtagctgcaagtctcattcaaaagtaaatttttctgtaattgggaagtagattttcttaaattgcctcttcatgcattatgaatagtttgtgatattttatagccaattaaaattgattagatctgttgagttgtctctgtagagtactttaattatgaaaaccagtttgaaatgagtccagccttgagacagatggttaaatttatgtttaaataagtccacattttaaaaaatggatacgactttttaaaagctcttttagttgatttcctcaatttgaggtcaccaagaatggcaactagccttcttattcaatatctgtatattttggcgatatttaaatatcaaatttatgttcaggtgatatatggaggtccttatattctggaattcaaatttctctctcagtttaacatatggaaaaattcatattggacatggtagtggccaaagtagagttcaagctacagttgttggtcatgaattctactgaagttacctgaaaatgagaggtttccacttatttttggatttagtgattaatatatatcagcagctaacttatggaatgaatgctttttgctgcataaagtatgaagtgaaatttcattaatatgataggaattttacaaggtaattaaaagtaatggcactcttagctttaatttgcattggtttaaagctgtgcagaaattggaatgacagctataataatctcattaaacactgaaatatatgggatggaatatgctatatgattcatttatattctttgtattacttcctaaatttgtccatattttgcttagttttgataagtaaacaaagctaagttctacacatgaaaaacttaagagaagttctgtctttttgctaattatcttctatattttatcggtaagcttctttgcaatattagttttggacttaattactaaaaagatgatataaatatcagagggtagaattgataatataaacagcgtgatctgaacagcacaaggtaaaattataatctttcaataactttttaaaaattgatttgtttaaatttctttttttcaaataagaactatatcaatttatgcatttaagaactatttgttgagttcttgctatatgttagtcactgctctcttaatttgggatattgtagataacaatacatacaaaaatcccagcctccttgaggcttacattttagagcagaagatagctgattcataaaataaataagtgaaacatagcatatgaaatggtgataaataccatggagaaaaatgaaacaaggtaggaagattgggtattgagaagatgatcatgtattcctcatggagaaagaaacatttaaataaagaatgaaggaagtcagggagtgaaccatgtgatcatctgtagcaaagagtactctaggtagagggaataaccaaacaaagtcattgagattttatcatttccggcatatttgaagatcagtacagatacctttttgtctataactgagttgattgataagagagaggcatggaggtatgagatgaggtcagagagggagaatgatggtggttgacaggcgatgcatagattatgtaggatcttggtagttcctttaaaacactgacttttactcaagtaagatgggaagccattggagtgttttgagcagaggagtgacgtgaatgaacttacattttaacaggataattgttgtaacctttttgagaatagtctgaaatgagagaggaagggcagaagtaaggagacagttacttccaggctattgcagtagtttaggcaaggggtcatgctggtttggacctggttggtagcaaaagaagtgctgagaagtgctcaaattctgtataaacaattaattcttgttattcatggtagtttgataaagtcactgtgtacattaaattagttagtgctgacttgtttcacctaggggacataaaggtttgtttcctgcaagcagtgacacaacattttcagcaactgatcaatacataactttattttatgtatgttttcatttaaagacacctaatttaacattgaactcacaaccaatggtgctataactgatggctaaatgaaacttatctagtacaggtatcttctcttaaagggtcatcacagcctttttgagtgtacgaccattatacttcggcactagagccgtttcaaacagtgaaatcaccaacaaaattcacaaaaatgtgaaaattgcaccacatagactgcaaattgtttacagttgtgaaagctgaaacaaaaagtggagcctaactttgttcaacctcagctaagaacctgtgcctttactcaaattttttgctgctctgcacatggcatgcctgtaactgacctggaatgcaatgcatgtattgttttgggggttttaaagaaattttacccagtaggtaaattcaggaatgcagctttcacaaataatgaaaatctaccatatattgaaagtagagcgggctggacgtggtggctcatgcctgtaatcccagcattttgggaggccgaggcagatggatcacttgaggccaggagttcaagaccaacctggccactggccatcatggtgaaaccgtgtctctactaaaaatacaaaaaattaaccaggcctggtggcacacgcctatagtcccagctactagggaggctgaggcaccagaattgcctgacccaggaggcggaggttgcagtgagccaagattgcccccactgcactccagctgggctgacagagcagcaagaccctgtctcaaaaaaaaaaaaaaaaaaaaaaaaaagcgtagaggatttgccattgaattggatgtagtttgtgagagaaagaagaaaagactgattccaagatttttggcctgagcaactggaagaatggcattattattaactgaaatgggaaaaatgtgggaagactggtttttagagtcttattagatactcaagtggaactgttgaattaaatctctagttcagcagttccagggagaggtctggagtagaactataaatatgaaatgttaattgtcatttaaagccatgagattttatgacattaccagtaatataaatgaagataaaaaagagaagagtcttaacaaagactgagcccaacattaagaagtcagcgaaataaagagttaaaaagaatacaaaagaccggccgggcgcggtggctcacgcctgtaatcccagcactttgggaggccgaggcgggcagatgacaaggtcaggagatcgagaccacggtgaaatcccgtctctgctaaaaaatacaaaaaattagccgggcgcggtggtgggcgcctgtagtcccagctactcgggaggctgaggcaggagaatggcgtgaacccgggaggcggaacttgcagtgagccaagatcgcgccactgcactccagcgaaaaaaaaaaaaaaaagaatacaaaagaccaatgtaaaaggaaaactaagtgaatgtactattctggaagacagatgtgggaagataggtttcaaggaagagcaagtgatcaactaggttgaatactgctaaaacataaggtgaggattaagatttggagttagcaaagtgtaggttattggtgattttgacaagagaagtttcagtggagtagtacagggaaaaccctaaatgggctgggtttaagaaagaaggagaaaaaagaaactggagataactagtatcagttttgcggtaaaggggaggaatgaaatacggaattaactggaagaagtgtagtaaagggaggattttttttttttttcaagattgggagctattacagcttgtttactgatggaagtgcacttctagggaaggaaaaacagttgaggcagcaggaatgaaggaagaattgctggagaaatgtccctgagtaggtgagagaggatacatctagtaccccaataaatagattagtcttcactttgaacaaggacagtttattcatagtaatagcttaggagagatggagagatataaattcagataaaaaggttagatatgctggtgaaagcttatggaagttctcttcagagtaatttttaaaaatggggttcacagactccctcttcacactaatatggttcagatttcaaaatcataaggtacaaaccattaagtatacaatgaaaaagttttttttcccactcattattcatttttttcctccagaggcaacagatattatctgctttttctagagatattttatgcataacatgtagcttttaagccagtttgttaagtgtgttcatcaacttattagatacctttcgtatcatagtacatattaggagttggaggttagtatgtgtttgtttatgctaaattaatgatgatctctacatttttgatacagtcatatcctaacatgatgactatttggtcagctttcattttaattttcgtatccagtatcttttaggaagagactataactgtgcatccctcacataacctaggacaccatggattgtagataaacatttaaaggatgaatgccctaaattttctgtaaatgttgttcttccacacactcgactagtcttctaaagtagagttaaatcttttttttttcagtgtgacttctttgtgtgttaatattacgtgtagtggaaacatacctgctaggagacatacaaattaaaactaaattttcttttctgaactaggaaatcagtgttttgatatttaaagaacaaattgttgaggtttcttatctgtaggctaaataataccagttctttagatacaatgaatattctgatactttaaaattttgatccaattttcacagctttcttttaactatattttaacgtcatttcagtcctagagaaatgttgaaagaatagtagaaagaattcccatataccgttcactcatgtttcccaaatgttcacattttaccacatttgctttatgcttttctgtctctgtatgtggtgcatacatatatatgcatgtgtgtgtatgtgtaaatataaaaacgtaaatgtatatttattcagttgtcatatctttttagttgcctttacactggaacagttaatagtctttatggttcacaaaacattgacatttttgagcagtatagaacagttattttatggagtattccttgatttgtttttctgcataatatttatttatttttcataggaataccatagaaatgatgttctgttgttggtgctttatatcaggtccatgatgtcagttcatcccattattggatattaatttgatcattggagtaaggtggtatacgcttgatttctccacacttaagttacattttcatttttctttttgttaataagtattgtagggaaaacgttgacgctatgtaaatacggtgttactcttcagattttcacccactagtttttatgtctatcaatggttcctgcctaaatcatttattattatggcaattgtgaaatggtaattttctaattcaattattccttttacatttattaatttgtttttaatataaggaagggctttcccctcctgtttattttttaaatttatgtattaatttaatgtattagaatgaactcacagattctgatttttattcatggattataattttatactatcataatgatatactatcatgctcggatttggccagtgggagccacttcaaactggctcctctgtccttttgacacattcctatcattcattgaatacgtattttctggctcatcttatacttttcctacttcaggttccatttctctatgaaaccctagttccttttagtggagaattatatttggaaaacagtatctggccattggtgtgctcattgctagtggagtatcttattctaggtcctgttaattgacagacacaggaaataagcaacacgtacacattcatgtacacctgtgctttcttctgttatctattggtctgtctagggatacactgaggggttcacattgatacttcaaattctagtccaataccatacagtttattcctcctcttcctatttatatatttgcaactgctttctctggcagtgagaaacctagcttctgttgttcacaatattttacttacttgctcaaatgctagaatacacagaaagtaatttcagtattgctaactcatgcctctgaaaaatgaaacttaaagactacagtttggtatttgtttaaagctttttttgtctttagctttctattgtaatcaaatactgttttccaaagttacttagttttttacaaagttacttccctactccttttagtgtggttagtgttattcactggaaatacagtttggttcatttgtttctgttgtatctcattttattttcccccctccctcttatccttgttaattttgtttatttatttctatgtgaaactttagtgattccaaaagttaatactgttcaaaaccatatagggaactcaatcatttttattttcctttctttcttacacaaaactacgattatataatattctttttcctttgcttctccattgataatgcatcttgaaaatgacaacatttgagttggtagacagttttttcatttttttttttttttttttctgtcctcacagtctcttgctcgttttttcattcgtttcaacagctgcatgccactttattttaagattatttaagccctttcctacatatggacatatagcttatttctgatttttctaattatatgtactcctactataaataaccttatgtatgtgttttgtatgtgtgtgtgtttgtgtgtgtgattggagatatgaattcccaaaagtgtgatataaattccaagaagtgtgatggctgggttaaaaggtatacttacatgtgattttgttagatattgccaaatttccttctataaggattataccaatttgcatttctactagaaatgtatgaatgttttttctccacatcctcgccaacagagtgtttctcaatttggtagatgagacatagtatctcacttcctcttttctttaactcttacattgctgtcactgctgtgatctaccactacagtttttcagtattttcacaagtagagcagaccttctttttctgatggttgtttttagatcagtcttaagcattctgctgtttcttctcttcaccccgacccctgcctcaccccccaacacccacctccaaccaacccacccaacagcatttggtcttcgtaaaggcttgctttgggagggggagagatcatttgtagagatttggtgtttacttttctactcatagccaatttaaaatttggactttctgtgcctgttatgctgagggtatgagttatgtttttcattttgttctttattatatttttgggtaatatgtgggagattcagaattatgctgctgccatatcccagctacccagaactccctcattcacagtattaggaaattatggaatgtagatttggacatggtacatcattcactttacaggttgttagaagactgtggatcaattgaatgtagcaatcactatatgcaaggaaattatattacacagagtttgagaacttgctctttaaaggtgttttatattgaatttttaaataaagtatcactatttcagttctctgaacagttcaaaacccataaaatgtttagtaaatgtttcttgataaatcaaattttcttatgccaggaaatttattaaaagtagcaagatatgtatatacctattattattattattattattattattattattattttgagatggagtctctctctgtcgcccaggctggagtgcagttgtgcgatctcggctcactgcaacctccacctcccgggttccagtgattgtcctgcctcagcctcccaagtagctgggactacaggtgtgcaccaccacgcccagctaatttttgtattttttaagagagacagggtttcaccatattggccaggctggtctcaaactcctgacctcatgatccttccacctcagtcccccaaagtgctgggattacagatgtgagccactgtgcctggccatacctatttttgtttttaatgctttataggagcatataaacacaaacattttctttttgtctttccaaattctgtgctttatttagcctttgctattaactgcattttgtcagttttctgccatttaatctacattacaacccagtgaattagaaagggcagataatttaattcctatgtttaaaaatcagaaactaaaatttagattaaatgttttgcttggggctgcacatctaatcaaaggaaaagctgagactagtactgactttttaacattgttcttgtcagaaccacactgagtaaaaaaggtagctccttcattgtttctacatatcacacttgaatttaacttccatgtgaaaaaaacatgtgtatacatttgacccaagtaactataagttaagatgaattcctgttcattttcttcatactcagtgtgcctaggatagcgagtgtagagtaataagtaaaattgtgaaattgagcagcgtattagtctgttttcacactgctataaagacatataattactgggtaatttataaagaaaagaggtttaattggctcacagttccacattgctggggaggcctcaggaaacttacaatcatggtggaagaggaagaggcatgacttcatggtggcaggtgagagagactgagcaagagtagggaaaactgccttgtaaaaccaccagatcttctgagaactcactatcacaagaacagcatgggggtaaaaataccccttcatgatttaaccaccttccacctggtccttcccttgatacatgggaattatagggattataattccagatgagatttgggtggggacatagagccaaaccatattaacaaggaatgttctgaaagaaaggaaaattgtaaggtggtggaatgtttagttatccaaatcaaagcagagtctacttgtaggcactttatttttagaaaataatcacttcttatttattatcagcaggtttctaccataattcgcaaatggcaaacacttcagaagtttataataaaaaaagtgactttttagactagcttaatgagtagtctagcctttctcttgtaaatgtcaaacttacataattgagttttgctagcttcataatattgttgatggcatgatatgttgtttatgcattctgttattacaaaacattaaatagatttgtcaacaagttgtggcaaacaaattataatttaatctctttgtgaattttattatgtggaggaggaaaaattggatgttttcctccttgttgattgacatgtagaacactcatgccctgctccaatgcctgtcatcatttaaagaaaaaagaaaaaaagcacacaaaacaaagataggatactgtgtctgttgaatgaaaaataagaattttttcattctatgtacttcacgttaattttaagagcatatgcatttatttaaaagttaagaaagtatattagtgatctaagatatttcgaagtaaatagaattgtattaggttattttttgcaataattttgttaagtaaaaggaattttaaaatttttatttgtaacattggtttttatatggtattaacatttctgaaattgacttatgtatcctgtatagcaccctaaacatttattttaaaacaaatcagtaaaaagtaacatagaatccctttccaaatcatggtaagtgagcatgtttttaaaactctttgtttttacctgcaagggaaggagataacagattgattgataatgtgcatgcataagtatgccttataaccaaatgtagaagtgtatgtgagctgtggagtactcctccccaaaatctgtcaaaacataacctgaaatctggttttaaacctgaaagtggttttgagaatttattattattattttaatacaatagattctgcattggatatttccaaaggcagtaaatatttttgtaattgttattaatgaccattggtaagctgttggtgattaaattttggctctaatgacttcaggctgtttgtcatatactatatttaataaagaaaaaggtatctgggaaattcttaacttctctaatgttatcttggagcataaaatcttactgagttgagtgttgtatgtttagtgaatcattttacaccagctagaaagacagatgggtagtgtgcagtttaaatatctgtgcaaatgagaggacagatgggtggtttaaatggtttaaatgtctcaatgaaaatgtgtagagagattgtcttctgaagttagactaaaaaattcagggaattaattaggaataatagttaatataacaaaataaaatttttaaataagaggcaaaatatggaattcagtgaattgattataccttttgaactgacagtaaaaagtaacatcttagaacacagtactcaaatacacttgcatggtaactgcctgttttgttttcttattatgaacatgtggactgtggaaagtgtctttattacttggaattaacttatctggttaattgtacctgaccttttgaactgttgtcagaattaatttgttcaatttcaagtagttaacagaaacttaaactagcttaaaaatggtgagtaaaaaaaaaaaccagactaaaaaccaaaaaccttgaaatgggcctcagaaaaggcagcttctgtagcaggagttagtgaacttttactcttattcaggaattaatatgacttagcttctagccaaaatattggttcctatattgtcaggtatgtaccttagatcttggatgtcagctccatgtaggagcctcctcctaacttgtgtgggtggggacaaaaaggggtgatcacttttagatggaaggctgtgggctggccatagatatgtcagttgcactgacctttttttttgtttgtttgacagagtctagctctgttgcccaggctggagtgaagaggcttgatcttggttcactgcaacctccgcctcctgggttaaagtgattctcctgcctcagcctcccgattggctgggaccacaggcatgcaccaccacacctggctacttgttttgtattttagtagagatggggtttcactgtgttggccaggctggcctcgaactcctgacctcaagtaatccgcccgcctcggcctctgaaagtgttgggattacacgtgagctgctgcacccaggcaattgcattgacttttggggacttttaatgaaatatattctgtaagaagaatgctaagtagtaatattcatggataaaaatgctattgtattattctatgaaaaattattagtaactgatcatgtgggaggatatgttccttagaacattaaaaatcattcatggttagtattactgaagttattttattaattgctaagttaaaaaattgtgccaagtgtcatgcagagtgagataaatcttctctagggatttattttaactgaggcaaaaaatttactgatttctgataaacattaaaaaaattcaaatagattagaatttttgaaaaaatcactgggcatacctcatagtaaggagaataatcattttatattacatttatataaacacatatttgattatttactggttcatgacataaaatatattatcttgtgggtggtagtcaaaaagtttgaaaagtattactttagtgattcaagtttttttctttctttctgattttcttcaggtgagaactaaattaatgtacttgcttccctcctgccactctagttttagaacatgtttctcttcagcagtgacaggggttagagatactcaggtgaaaagattattttcttattaagaagttctttatgttataaagtgaaatagattatctgggtaacattttgttaaaaacttggacagttattaatatcctcatgtgcaagagccagtgaatggacaatgggtacagaattaaactctttaaaaaaattatgtgttgctccatagaagtcagtggtgattctagtatttgtgaactctagaatttattgatagtagagacatacaagtctgccagaaggtttgtttctgtttatacgatgtggatgtagttcctgagcatcagaattggagggatgatgagaaagcaagggaattctatttctcattctgttgttcttcctaggaatggtctgaggtctgaaattgtccctctttgcaaaaaccctcaccttttctctgctctttgctctggggtactgagattcttaaatgaggaatactcagatggttgctgagcctaagcagaatggcaacagaagggagcctgccgtcaaaaattctcaacttaagatctgtttctgtttcagctttctacatatggctagccagttttcccagcaccatttattaaatagggaatcctttccccagtgcttgtttttgtcagggttgtcaaagatcagatggttgtagatatgcggcattatttctaagggctctgttctgttccattggtctatatctctgttttggtaccagtaccatgctgttttggttacagtagccttgtagtatagtttgaagtcaggtagcatgatgcctccagctttgttcttttggcttagggttgacttggcaatgtgggctcttttttggttccatatgaactttaaagtagttttttccaattctttgaagaaagtcattggtagcttgatggggatggcattgaatctataaattaccttgggcagtatggccattttcacgatattgattcttcctacccatgagcatggaatgttcttccatttgtttgtatcctcttttatttcattgagcagtggtttgttgttctccttgaagaggtccttcacgtcccttgtaagttggattcctaagtattttattctctttgaagcaattgtgaatgggagttcactcatgatttggctctctgtctgttattggtgtataagaatgcttgtgatttttgcacattgattttgtatcctgagactttgctgaagttgcctatcagcttaaggagattttgggctgagatgatggggttttctaaataaacaatcatgtcatctgcaaacagggacaatttgacttcctcttttcctaattgaataccctctatttccttctcctgcctgattgccctggccagaacttccaacactatgttgaataggaatagtgagttacaccttatacaaaaattaattcaggatggagtaaagacttaaatgttagacctaaaaccataaaaaccccagaagaaaaccttggcaataccattcaggacataggcatgggtaaggacttcatgtctaaaacaccaaaagcaatggcaacaaaagccaaaattgacaaacaggatctaattaaactaaagagcttctgcacagcaaaagaaacctaccatcagattgaacaggcagcctacagaatgggagaaaatttttgcaatctactcatctgacaaagggctaatatccagaatctacaatgaactcaaacaagtttacaagaaaaaaacaaacaaccccatcaaaaagtgggcgaaggatatgaacagacacttctcaaaagaagacatttatgcagccaaaagacacatgaaaaaatgctcaccatcactggccatcagagaaatgcaaatcaaaaccacaatgagataccatctcacaccagttagaatggcaatcattaagaagtcaggaaacaacaggtgctggagaggatgtggagaaataggaacacttttacactgttggtgggactgtaaacaagttcaaccattgtggaagtcagtgtggtgattcttcagggatctggaactagaagtaccatttgacccagccatcccattactgagtatataccaaaaatattataaatcatgctgctataaagacacatgcacatgtatgtttattgcggtactattcacaatagcaaagacttggaaccaacccaatgtccaacagtgatagactggattaagaaaatatggcacatatacaccatggaatactatgcagccataaaaaaggatgagttcatgtcctttgtagggacatggatgaagctggaaaccatcattctcagcagactgtcacaaggacaaaaaactaaacaccgcgtgttctcacccataggtgggtattgaacagtgagaacacatggacacaggaaggggaacattacacaccaaggactgttgtgggatggggggaagggggagtgatagccttaggagatatacctaatgttaaatgacaagttaatgggtgccacacaccaacgtggcacatgtatacatatgtaacaaacctgcatgttgtgcacatgtaccctaaaacttaaagtattaaaaaaaaaaagaatcagctagaaactgatgccttgacaccaatgaatctcaatgcaatgaaatacaagttacaaaagaatgcaaataaaatttatttacattaaaaaaaaagatctgtttctggggagaggatttatttggaggacttctttggaaagggcagaaagtagtaaatatcttgaacagtttattttctgagtctacaatgacaagaaatatttgtgtaatttgcatcaaaagtttaagatctgcttaaaattttcatttctttatatcttcatttgcttatattggcaatctgtaaatgttttctaaatgactagtaaaggaaccataaaatgtttttaactcataacattatcagtatctctcagacttcttccacatgaagtctaaatttctctgcttgattttcaagtcattcagcacctagaactgcactacctaaggagacctatttcttcaactttctcaaaacttgctgtctgtagacaagcttatctctatgtaactttgttctttccatgtattcactcaatattgcagttcacaaggctctatttcaaggactgttttgccaaatactgaattcccaatgtttagcacagttcctagtagcgttcagctaataatattcattgaatgaaaggaaggaaggaatgaagggaaaaaaggaaggtgagaggaaggaactatctgttcttatcttttttatgcttccccagatatgtcccatattttaaggtttgtcttctccacaaagcctcctctgactacccttgtctttgttgatatctcaaacatagacctcaaaatttaacattatttacaaactttcttggtttcttggttttacagttttatgtgcactgctgtttcaatttggtataagcttcttgaagatgaaaaggatcatatatctgtacttttttgtgttttactttgacctttattcaccatttagtatcctacatgcctccttggcaacctttgtgttaaggatttgcaaatctaacagtaccttgcataaagctaagcacatattatgtgttcaataaaatttttttgtttaaaaaatgcgtgaaataacataaaacagtagtaattcagtttgtatgtagtgaagatacaattttttttcttatctctttactaactttcttcagtttttttttttttcagggaaggaaactgaaaaggccaaggaacgatacgacaaagccacaatgaaacttcatatgttgcacaatcagtatgtattggcgttgaaaggggcacagctccatcagaatcagtattatgatatcacacttcccctgcttctggactccttacaaaagatgcaagaagaaatgataaaagcactgtaagatacattttctttttatcataaaatcccttcacaaaatgatttcaacatattttctctctagtttaggtgttgcttcataagttttattattaacccagtccagggggtatttcagaccttgattcttcttgattttcacttttcatgtcccttcagtttgtgcttatcccctaaaccttctagctagcttccaaaatggtccttcttttgtatgtttttgttttgtttccttagctggaaatttaaatgaaaaaattataagttgaaaagtgttaggaagtgaatatctgcctccagagagttgggtatttaaatcttgaacaactgaagaggctcaaggaagagattttttgaaagtttatttgtcagcttcttgtttttttttctgtataagattaaaatcaacaaatgtttattgaagttttacgtatgcaaagcacattatctgatgcttagggatatagagatgagcagggcacaattcttgccttcttgatctaacagtatactttaattagtgagtcaaatggacacatgtttatcacacacactgatacaaaatgacagaaaaaataagtcatcctttggtagaccctatttccttgcttagttgttttagtgccttccaaatgactaaattcaattttctttcactgaaaattgtgtcggggaattcttcaatgttagagttgctgtgaactatgagtagggttgaagaatggtgtagtaatggaagagcattagaaaagaagtaaatggttatctctcaggtggagttaaaattcaaaaaaagtagtgaagtatgagaaaaggaacttggaccagtttaatgcaggttcttgcattgtacttaatttatctgtaattacataaattagcacataagctcttaggtttagcatattttgaaatgtagtggtaaattgatatgaaaaattattatgagcatttttcaggttatggtgcaagaggaagcctgaatattacatcaattaacccatttaagccagaggttgcaaatttttttgtgtgaacatttttttttgtgcataaaatcagaccttagcgataaccttgagcagtaggatatgaataactcccataagtttagtgttccaataatggaacactagtcataaatgggttaataaatgccaaagtaactgttaaaggtaaaatgataatttctaaaacaaaacatttcatttatagactacattgcagtttgcaaagcactttcatgtgcatttgcttacttgttccttacagtatcctgtagagttaggaagtacaggttatatccagggtatatctatgacagacaagtgagaatggacccagattcacaaagctaagaggtggcacatctggaacttgaagcttgagtcttctgactaaccctgcactctccgtgagaggaatgtagtgatttgaagaatgtaccctcaaaattcttgtgtacccagaatctcagaatgtgaacttatttggaaatagggtctttgcagatgtaattagtcaaggatctcaagttgaaatcattctggatttagagtaggccctaaatccaatggctggagtctttataagaagacgggaggaaggacagagagagacacagagaaggccttgtgaagacagaggcagagattgacatcgttttctttgaagggctcccccgtgccatgacagatttagtataactagctatcattgtgttatattattctgttttacatacaaatatttcagattagggataatatttcttgggctattgacttccacagcctctgaaattagaagcgcaaatttgtctttgctgccttccagactctgcttgactgacttttacttctctttatgtgaaaataaagataatttgatagtatatacttgtgtgtaggtaagactaaattttaggtgatcctccatattcacataagaagataaagtgtttttagttaatttgaatatgtaaactttttagtgttgataaaatagtgaaatgtctagttaaatatttgattcatagatttacttatctctaaagtactattgatttagaaatatttcctttcctactttcatttattaatagacatatttaaactgttcacatgattttcaataatagtatcttcatcatcactggaatatttttttgagacatataatggtttctcatggtatgttatctgtactttgtgtaatacattattttagatttagaattttaaaaatccaagcatgattatatcaccacagatgaatctcatggaacaaatacccattcatataatattaggagatgtttttcatttttcctccccatttgtattaaaggtaaatgttaatgatctccacattacacctatttactgtattgctttaaaagagttatttagataggctcatttacattagcaacattcagtacttttacttatgagattataatcccagagatactgactaaatctgtattaaatttttctgcctccccttttctttaaattgtgtctgccagttgatttctctaattatttgaaactagcattgcctgaaacaatttaaatctcagtttttttacccaaatgatattttcctatttaaaataaagtaattgagagaatacttcacaataagggagcttttgtacatattagttttttataagtaatgatggtggaaaagaaaaaccatgctttgtatttatttcagcatatgcaggataaccttgtctgtctacacttgctgttgacagtgacctatggcatatttttacagtatagcatttttaagtaggaagctggtctctgcgacagaatagttttttcccttttgcatttattagaccaggctaataattttgatgacatttttgctactgattggaggtcaagagaagaaatttagatgtcattcaaggtatagaaccagttcaactaagtatacaaaaaagagcagaggcccagaggagcagggaagaaccagtcaggtagagcatgtgaggaagtaacagacactggaaaggaacattaaagagtcaggagttgatcagagttccatgttattcaacccaaaatttatacgagaatatttagacatagaaagttatcaactctggccctgcattttggacatatcaaatacatttttgaaaaggtaatgccatattctatatcatttgtaattattgtattataacaaatataaattgctaatctgtacatttatataatccctcttctttactctccaggtatgaaataaggtggtacaggaaacaaccatctgtacatttcaacattacatttcttatgcttattgttctgaatcctttttgagatagtatctctcttgataaaactttaaaatgctgcaaaattttatttttgttttcagcaaaggtatatttgatgaatacagccagataaccagtcttgtcacagaggaaatagtgaatgtccataaagagattcaaatgtcggttgaacagatagatcctagtacagaatacaataatttcatagatgttcacaggtatgacatgtttattcctctttaaggatttatgacagtattatttttcattcatacaatagttaaccacagataaaaataagaaatacttaagatcttattaagacatagaatatttcatattaatttatctgcttttaattttaaaagttctttgtcaatgatgataactatataatgtatagtttttgatatgtaaaaatttgttagttgttaatccatatttaatccatgcttaaatccatatttaatccatgaaattttttttttatgcttatataataaaaccatgactttatatgtatattacactttatgatgcgccaaatacttttccatggcatcttattttatacttaatacaattgtgacaggaataaagcaggttaatgcctgaattctacagataaggaatctaagtctcaagttacacaattttgaaacccaggatttagtttgatttatactatttgtgttttctttgttaacataattttggataaaaacaaatattctgcctttagtgtatatgaagatatattatgatactgtatttacaatgatcaaaattatttgccatgctttactagaacaacggctgctaaagaacaagaaatagagtttgatacttccttactggaagaaaatgaaaatcttcaggcaaatgagatcatgtggaataacttaacagcagaaagtttgcaagtaatgtaagtattcacaaaatatcaacagtttaaatactagtattattattgctttattgttgtactcagatttaaaatatcaattatttttacaagtattgaacagtaaatttttggggtcagagtgacatgttttgagaaatatgttaattttactcattttcgtcactacttttggtaattccgaatatcaaagttctgtgtgatgttacattcatttgcccaattgttgctagtatttgacattggaataatgctttatgcttttcaaaatttatatatatattaaaatctcatttcatcctcacaatttattggaagaaccattttggaaattaggttgtttactgttagagataagagacttattgatgtcagagcacttagtacaaaaaattgacttttaattgaattattttctcttgaagcagggatgtcttctgttataggctgttaaatcagttccttcttcactttgttgtttttgttgtgtaaaatattaaaggaattttgagaaatcacaatgtgtttttagttcttttcaaacattaaaagcaattagtagtatatttttgaatttagaaaacataaggtgctctacttctaaatatttaacctatctcttgattttgtgtgggagcaacacaaggaaatatatttattaacaaacattgcatgtattttttctttatgccagaaccacagctataaatgattatgcactcattgctcctcaatgttagacatgttatatcatatcacctgttggaaatttacctcaaatgactcagccaaatgtccccacctaatataattaaacaatcttctttctattgttcagtaacatggtggtggtacgggtaattagctaaggtaggaaatgcagactggctcttggaaagaggtttggaatctttttttttgtttttttaattttatttcattttaattttgagatgaggtctcactttgtggcccaggctggagtgcagtggtgcgatctcggctcactgcaacctctgcctcgcagttcaaatgattctcatgcctcagcctcctgagtagctggattacaggcatgtgccaccatgcctggctaatttttgtgttttttttgtagagatggggttttgccctgctggccaggctgatctcaaattcctgacttcaagtgattcacccacctcggcctgccagagtgctgggattacaggcgtgagccactgtgcccagccaggttttggaatctttaaagctggctagataggattgaagaaactaacaaatatttgtccgcaaatcatgtgtacaagatgaaggcttagtaattatggcatactgactactggtgagagcaatggaggcatgagagtacactgcattacagagtttttcctagcagccttattgggatttttgaagctgttcctaagtttttcatgccctatacaggggtctcacttgactaggtttctgaccattgatatttacaatgtcagccatctctaaaccagtagtccttgccctgggtgattttatactccaggggacatttgacagtatctgaagacattagccgtagatgctgctaaacgtcctacagtgcacaggacagcctcccaaacaaagaattatctggtgaaaatatcagtagtgttgaggctgagagactctgctttaaacaatggagttgaatgtatggtgcaaaatggatagcagagtttctcaattcctgtgcagtgagacattccatttctcaattcacgtgctgctggtgaaggaatatgacatagattactcctgtttctttttattataatattgctcccaaataacttactaatttattcatctgatatatttactgtatatctaaggttgtaagggttaatgccttcaaggactttacactgaaattgattaatatgttttaataaacaccagaaagagtgagtatatagattttggaatatagtgtggtaaaattaaaaatagctacctgttataagcttatgtaaaatcagagattttgtgaccaaagaagaatttgttttatagctttctagggtataatgagaccaaaattaggtatgctcataaatcattgtttcttaattatagtgatgaagcagtaaacaaaaatgcaataaattgaaggtaataaatctttgataatgtggtagaagttttaattgctcacattttactgagataaactttagttacatttcatttaacagtgtctgtattcaggatatgagtttaagattaggggtttcttcaagaattttattcccagagagttattcagcatctctgttggcactttcaaataagtataaggtaattccattaaaactgtatgtatttttttaatgtaatataagacttagaaaaatctttcttcctttttttttttaacttagtagtgctttaaagttaaacatcttttctttcctgaaggcattaatattgttaatttagtcgtagattcgtgttgtaatattattctaatagaagtgaaagaaacaaatgaacagttagttcctggaaaaagaaatacaaattaccaatagtacttggaaaagatattcttctttggcaattaaatataaattaaaaagaaataggctatttaacttaccagattagaaaacattaaataattggataatacccagtgttgtataaagtacagatatataagccctcttataaaatgttgctacatatgtaagttggtgtataatttggcaaattatatttgtgaaactggacagataacttatcccctctgttatggaaatctaacactatgacatgtacctgataaagttatcacctttacctatctgaatatgtaccacgaagcattttatcgtaatctcattatttatctatcagccatatttatcaaggtctaaatacataggagagttaaactcaattatttgtaggattatctcctatttataggaaaattttttggatggtatcttaccatgtggtcaaaggctatttctcagcttcaggtaacttctagtactggacacctgaagctgtgcacttcccatcacacatgcatttatgctacattattttcgggcttaaatctgaggttactttctttgtatctattatatataatataatttctctccttccctaccaacacctatctcccatctgcctctttttttgcatctaccttctttgccaaatgctgaaagcgtttttgtgcttaatttatttttaatcatctatttattaaaattatatatgcaaatatttcatctcatctagttactatttaattgaataatttgggactcagtaattttagtttttcaaattagttgaaaaagtaaagtccatacaattttgaacattagaagaatatatttaagtgtctgtttcgtgctttttgtcattatggacagatgagtcatctaatggtgacctattgcaaacttaaatggagttttgaatcaacacatcagtaggctaagtatgacaaattaaagatagcaggttattctaaaataatataagcattaacttgtctgcaaaagaagaaattttgattaattttaataaagcagtaaagaattaaggtcctatttagttattttgttgactctgttttctgatttcaaatgaggtctctttattataaggtgttattgcctatcagtagtagatatatttgaataccatgattacgtaaaatgtgtagtcttgtattctaaaacaaaatctagtctcaggccttatgatttcaagtacattttttaaagtttaaaatcagaacatatttagcttttagaatataaataggatatctcaattgaagaatggtaattctttatgtggaaaagtgattgtcttggatcttgtagggcatgagtcagcaaactatagcccatgaggcaaatccagctagttgcccatttttatgcagcccacgaggctaagaatgctgtttgcattttaaatggttggaaaaaaatcaaaggaagaattatattttgtgacacacaaaaattatgtgatgtttaaatatcagagtacgtaaataaagttttattggaacacagccatgctcattcacttacctgctatctgtgggtgatttcacactacagtggcagagccaagcagttgtgacagagaccatatgtggcacactcattacttcacacatctgcttggcactatacaaatcacagtgacacagttataactcaacagcattttgagtgccacacatatcagtatactgtggcatcttatttttattatcagttcatgcctatagtgtcaaaagaagaagagaaaatagatttcaaatgtggcacttttaaggcatagcagaatgtggattattttgttattgaattagatgaagaaacattgtgtttattatgcaattgcaccatgcctgctaagcactgaatatacttaattaaaatcttatggtcatggattgctattggtatttggcagtactagtctatgtactgtacaaatgtgaaagacttaaaattttattaaatatctgcattaataggtgaacatttatagttgattttgattataaacactaactttgaactgcagtgataggaagtattatggccatcaaaaaattttcattcttctcattaagagacttgcattacgataacatgtgcccagttattactgtattttgaatttgccaacaaaatatttgtgaatctttgttttctcttttgttatataaatacctatgtaccatgcttgattttgcttcttggtggcaaagtctaaaatatttgctttctgtgcttttatcagaaaatggttgctgactcctgttacagaggatgataccaatttaacccatccaactatctgaatcaaccttgtatttaatggggtgtcaaatacttcactactccatctcttgcatagagccttgcttttaccaaatctgtttttggctgttcttgtttacagtattagctcaagtttggtctctggttgaacatatacagtattataatttgctcaggctgtgttaggggaatactttaagagtgagttggaaagatttggaaaaatgtaaaatattgaagtcaggtgacatgtcggaaggaccgtttgattaagggaaacaaagttgtatggaagaaagcagatggatttgttggattggaggtggattaagtgggtattaggaggtgactgtatttaacagaaactcgtaactttcacttggttgtagaagccatcttctgtttactcttgagaaaagctcataaagatttgtgtcatggtatagattgtcatccataaaaatcctatgctcttgcaattatattttaagaaagagatggcaagaaatagtttatgttttcaatttatattgcaacaatagagaaaaagagatgccagaaaagttacctcaggcaactataaattccatttttttaattaacccaaatgtcacacttaaagtttcagcattgcaaatttcatgtaagaaatgaaagttaagatggtttgtcaagtcataattttttttggaagttggaagtttgatccctttaagagtgttgtaagatttagatcgtgacatccaatgattatgatatgaaaagtgttggataagtattggaaactttttattatccatagtaaaggttttaagactttgtatcttttttttttagactgagtcttgctctgttgcccaggctggagtgcagtggcgcaatctctgctcactgcagcctctgcctcccactttcaagtgatttacctgcctcagctttccaagtaattggaactacgggtgtgcaccaccatacttggctaattttttgtatttttattagagatggggtttcaccatgttggccaggctggtctcgaactcctgacctcaactgatctacccgccgcagcctcccaaagtgctgcgattacattcgggagccaacatgctgggcttcctttgtatcgtttaatacaattaaatctttaaaaattatctaactaaagcatgcagatgataaaatctataaaatcttacaaaaaggtatacaataaaaattaacattttcctttcttcttttcgtcgaccaccatcactaccttctaggtttaactcatgaagaaagtgtatgtatttttccagaatgtatatacaatgtatatacatgtgtgtgaattgttttcttctgtgtaagtaggaattattttatgcatattccttagcatcatcttcttttttttaacatgtattaaatcttcttaatgtgtacagtgttttactacttgtatgtaatgtaatttctttagttttgttatttattgatgggcatttaggttatttccagttttttccattgatggagttggtgctaggttttgtgggactctaagcttataaaattggagtgtggggaacatctttaagaaaatctatacaaacttacaaatacaaaattaagtagagagtcttggaagggatcatgcaagtgaggcacctgagaactaagcatcattagcatcatgatacatttacttttgtttattgtgattatacaataaacattcttgtatttacatctttgtacacttttgaagcatatatatgggataaattctaggatgtgtaattactaagacaggatattagttgttaagggtgtggattcaggatttaagctgcttgggctctattatcagcttttcccacttaccggctctgtgacggtggacaagagctttaacctctctgcttcagttcttcatatgtaaatggggattataagggtgttataagaattatataaatttaagtgcttatttataaagtgcttaaaactatgcttggcactcaaatgttaagtattatgtcattttgtgatttttttccaggtagggtcattttatgacttttaactgctttgccttataatattataatatttaatttaaaaatataaagaataagccatttgaactgttactattttttatgctattttattttatttaagttccagatacatgtgcagtacatgcaggtttgttatatataacgtgtgccatggtggtttgctgcacctatagacccatcactgggtattgtctcgcatgcattaactatatatcctaatgctgtccctcaccctgccggccctcccctcagaggccccagtgtgtgttattcccctccctgtatctgtgtgttctcatttgaactgttactattatatttgtatacgaaacatgtaataacatgatggtgaatattgtactttgaaatttatgaactattcttacatttgttatgtcatctatacatgaactgtaattactcaaatgtttttctcttcacttaattcacacattacaggtttttttttatttttaaggggataatggtaagaaagagtaaatactttcaccatatgtattttttttagattaaaaaaaaatatatatatatatatatatatatttgaggcaaagtctcactctgttgcctaggctggagtgcagtggcacgatcttgggtcactgtaacctccgcctctcaggttaaagtgattctcctgcctcagccgcctgagtagctgggattacaggtgcctgccaccacacccagctaatttttgtatttttagtagagacgaggtttcaccatgttggccaggctggtctcaaactcctgacctcaaatgatccacccgccctcaacctcccaaagtgctgggattacagatgtgagccactgctcctggcctccctgtataattttattcttctaaattcatttgtcttttcttctttgatgtctgtctagtagaatgtaagtttcctgaaggcaaacttgtttattattgtatccctactgtctagcagactgtctgacacaaggaatgtgtttaataaacacttgtttaaatgaatgattgaagttttgagaagagagatgaatggaaaattaaccaggaagagaatgagaataagggaaatgtgcagggaagagcagcaaaggatagaacagaagaaagtgataaggagaggaaaggctttttattaaattcagctttgatgtagcatggtcaaggcagtgataagaagctggttgttttttctgtttccaccagacttgggtgtcagaaagtggttgggacagattctgaggtagggctctgtgttctaaactttcatttgaattaaatgagattatatataaggcacagttggaacagcaaagcattatgtgttatttacttatttatttatttataattatttaataaggaagttggagccagtggttgaaatgtagctttcttgacaatgatcttgaatcttaatatagtaatgttttctttatctgatagtcagaatatgaactattccatgcaagccaattctctcaataactgaagcttgtatctccatgatattcaaaaacataattttactggatttgatacaaatgtcttatgaatatatatatatgattaaagaaaaatgttcaatctgacctttccctgatgactctcgatcattattataagtattattgctttattttgctttaatatcaaatgccgtcagagacttactgaaatttatgacgttgtttcactctaaataaaaatgaaataatatttattgctgtatttagcattcttctgaatatgtataatagtttttctgcctctcttatttctattacctattatttaatgattctaaaaaaatctattcctgttataagagattcaaacaatgatatatatggagtaaactatgaaagacttctttggacttaaatcactccctagtccaatcgcacacctctcagagtattgataaaactttggtttatagtcatctgtttcttatcctgtgcactcacatataaacacataccacataaatatattgtattagtctgtttggactgtattagtctgttttcacgatgctgataaagacttttgagcctgggaagacaaagaagtttaatggacttacagttccccatagcttgggaggcctcacaatcatggtagaaggcaaggaggagcaagtcacgttttacacggatggcagcaggcaaagagagtttgtgcaggggaactcttcattttaaaaccatcagatttcatgagacttactcactattgtgaaaagagcgtgagaaagacctgcccccatgattcagttacctcccactgggtccctctcacaacacgtggaaattgtgggagttacaattcgagatgagatttgggtgaggacacagccaaaccatatcagactgtcatacaaattaccataggctggatggctgaaacaacagaaatgatttctcatagatatggaggctgggaagcccaagatcaagatgtcaactgatttgggttacttatgaggtctcttttcctgacttgtagataggtaattcttgctgtgtcctcagatgaccctttctttgcatacatgaggagagggagaggagaggtagtgggttctgtgctgcttcttcttataagggctctgatcccatcatgagggccccaccttcatgacttcatctaattctaattacctcctagaggctccatctccagataccattatattgggggttagggccccaacagatgaattttggggtcacaattcagttcatggaacatatgcatgtatatgtattttaatataattagaacaatgctatatgtattctgctacattttgccttttaatttaaaattgtatcttagaaaaaccttatatatgtgtacctaattctgttttagtgactgtatgctatactagggcatttaaatattttgtagttttttgctttataatcaatattgcaacaaatatttttgtatggacagactttgtgcatattgtacaagtgttttggtaagacacatttttagatggtcagataattttctaatttaaaatttgagagacagttccaagatgacccctgaaaaatctgtgccaattttttcacatcagtgatgtataattgtttccattaaaaaaaaataatattgctattactggatattccaagtatttttcatgcttgtcaattttagtaggtgaaaaataacttattatatagtcagtctagttataataatgtcatatgcttattgatcatttaattttttcatggtgaacttccgttgtgttaagcatatgaacttcatatgcttattgatcatttaattttttcatggtgaacttccattgtgttttttgtccattttcatattagtttgtcttttttctaagagtttttctgcacgaaaagggctctttctggtaatttgcgctgcaggtatttcttcaggtttgcttttgactttatgatctctttaagttcaaataaattttcatttttatagagttagattatttaatattttcttttttgtcttttgggtttcatgtcttgctttgaaaagctgaagataaaaattttaaagtgatatgatagccatgtatgtttttgtggtagaaatacttccgttaaggactcaatgcattttatacaaacataaattatctggtttgtgagcgcatattaatttatgtattaaattgtcttcaattctatacagaaaatactcctaaagtattactacaatatgtgaaaatagaaatagcttaccatgaatttaaaatgacaaataactgagcctcactttcatttctttaaaataatactatatatctcataagattgttgtgaagagtaaatgagataacatctgcaaataatactacttaccatttactcaatgtctaccaaagttgttctcttctcttttctttacctacttctctttttctttttggtgaataagactctagaccagtattgcccgagtacttactgtgattattgaaatattcttttttccaccatccagtaaggtagccagtagctacatttctgtttagcacctgaaatgtgtctaatgcaaccaaagagctgaaattttattttagtttgaatcagattatatgtggctactgttttggacattgcaacataagatgtatgaatacttttttgatatgtataaagtgaaaattaatttgttggttgttattgaggatactgtttattctaggttgaaaacgttagcggaagaacttatgcaaacacagcagatgcttttaaacaaggaggaggctgttttggagttagagaagagaattgaagaatcttctgaaacttgtgagaagaagtctgagtgagtaaaagagaaacaatttgaaggaagaatgtttaattgtaattttacaaaaatattttagttacatggcagtgtgaacctaacatttctagaaacagaaacttttattttaagtatgaagttttgtatagttaatttctaggattctggaaaaatgattctgtggttttaaaaaatatagtgtccttgggaaaaatgattatgtatttttgtaaatatagcattctgatcatatgtctcaatgttttaacagtttgaactatctttcaaaaattcattgttaaaagctgtctttactttcctacatccattttcaccagacccattgtgaattcccctgttaagaaagtggcagaccaatattacctataaatagtctctactctgttaaatggaagcagactgatgagaaaacagataaaaatcactcagtgattagctgtgctattttgtcttgctgatttctggatttgcaaatatcttcctaggtccacagactttacttgtgttggtatactcttcttttactgacttcattatgctttctactgcttaagaatttaaaatttaatctaaacttcaagtttctaatctgcttttattaattgcatctacaagagtgggtgctggtgtggtttttctaatcctgactagacctcacatatttcttgctattatactctcacatattctttgatttatcaagactctcaaggaatttgtgatatatagaatttctccagtttatacctgctatttctgcacaacttttcatatatcctccacttatttcagatctctgattacttatctccctcatcatagtgagcagatggacatccacatcccagaaataaattagaaacattggatgacatttttcttcttttctgagattagagttccaaacccacccaaatttgtactcaacatctttccttacttcaatagaggaacagttctttgtcctaagttcatttcttatgcctggttttttttttgtttgtttgtttgtttttgtattttctcgtctctactttctcagattttacataatttatgtattatgttcacctttccttcccaactgggtccttgtgctcacttttaaaatatacttaagtcttgactccgaaaaacaatctccacctccctacccaccccaaataatcctttttaaatctccatattttttcccacgtactatctttgctttctgttttcttagttcgaacttgttccaagagtgattatgctcactcatttcctcaattcccacttagttttcaaagtctggctttttgccctatcgctatggaaatgggtagctctaagatcacaatgatgtctacattgctagctaaatttagaaactatcttacttgacctcttaatagtatctgaatttactgacttcatttattttcttttcccttggcctttggaactcaaaatgccagatcttaatcctctctttctggccactcctttgcaaacccattctcttccgctcagccaatccattttagagttagggaaggcacggccctaggctgtctcactcctttccctgaactttttccctaagtgatctggtgaagatgagccatttattactctctctcagatttattttctgaactccgtggccatgtaaccaattgcctacttgacatgcctttttgaatgtcttagaagtatcctaaattcccaatgtctaaaggctgaattaaaaatctccatacaacccaaccaaactcaacctaacctggttcactcttagtattctttatttcagtgaatggcaacatcatccattctattataccacatcaaattttagagggctacttttctcatttatactatagctgttattacaacttggtgttaaatttttgtctgggtctgtttggtctgctataacaatgtgccatagactaggtgacttaataaagagcagactttatttctcacagttctggaggctgtaagtctgaaatcagggtgccagcatgattgggttcttgtgaggactcttttccagactgcagactgctgtcttctcattgtatcctcacatggcagaaagagggtaagagctccccgggatctcttttataatggcactaatcccattgataagggctctaccttcatgacttaattaccttccaaaggcccccacctcctaataccattgtattaggagttttcaacatctgaattttggcagcatacaaacattcagtccattgcaacattaaatgggaatcgatgagccctgtaaaggcgagaacaggaaaatttgagttactctgatcattcctttactaaatctgcaaatttttagtattgcattaacagaagattttatttgaatggtaaaataaaacatcacccattgcacatataaaattaaacaaaagaattatcttttgcttttctgtgtttgtggatgaatctcttcacatgtttatagatgaccaagtggttctactttttataattttgcaaaaggacacattataatgactcctattttaaaatttagtggatataaagaaagaaaattgaaagtgctaaccatttcaccagaatgtctggctataagttgttggaggagatgatctttaagggctccctaatctagaagttatgagattatttgaatttttgcatgttttcttgacaaatctttgcctctctttttatctacataatgggtgtataatccatgttcctctacctgtttatatttatcaggatatgagaatggatataagagaggagccttgaagggtagtggatatatggaaagtaacatttcttgagtttttactttgtgtcacatattatgctgggtatttatatatatatattataacatataaacatatatattatatataacatacataaacatatatgtaacatacataaatgtacatatatatatatgttaactcattgaatgttatctttctgtgccttttgtatagtagcctgtgttttaccttcaggtctttgagactttacataacttacttacaatcacatacatagtaaatggtagaaaagacatgagttgttgactccatagcttctgtctttttgatcatattatttgcttgatcttatgattttaacagcattctttagagaataagttagcaggggtaagtatgccaagcttttcaggggatgagacctgtttaacccaactcttgttaacctttgttaccatggagttattattgttagagtcaaggtataatcttgaaaatgttaagtatatttatatgactaaagagttactgctaaatttcattaaatgcagacattggtagggttaagtttgcctttgaattatatgttaacatattttgctaaacacatagtctgaaagggattccagggcaaatgtttgcattttaatttcttaatatttcttgaatatttccttttattgtgtacatgtgtatataactacacatgtatgtttaaatatgcatatataattaaaatcaatttttatctggttttaataataaacttacattatctttacttctcaacactttgttagtttcatgtactgtgttacttgtgagactacatttcttcctaaatgtcaaaaatagtctatgttagatatttgcattcttaaattatttttaaattaatggaattatattgaatgtttacttaatagaaataacagtatttgttgtatcaaaatatgagactaaaaccacatttttataatttgaatttaatatatccatgtctctaaaatatctaatgacagtgaaaaaataaattatatgataaatcatttgatggctttgattcctataattgaataatatgaagagaaaaataaacttcaagaatggcttttatgtgattttaaattgacacattagcaaaaacagagttcaagcttatataagtaatgcaggtcttagttgaaatgtagctatcgcagaattttatttaaaaaatatagaatgaaagaaataaaaccaaccatttgaaatttttataaaaaaattttaatgtattaaatacactaaatatgctaaattaaatacatttaatgtacttcgtgcatttagtgtatttaatatgctaaaattttgtattgtataacatacactaaatatactttaatccaacacagaatatcagtctagtatatataccttcactcattacttctaaagtctctttattcaaatggaaataataccaatcttttcctgatttgtggtccttgacttttgtattagaaaaaagttatgggaaaaaataccaagcatatgtcatttatgacttggtggcataaagagctagtgatgttactgttggtttgaatgcttggtttgatttacaaaaagtaaatgattatttaattttgtattgtcttaacctgttttatatcattatcacttagtatttaaaaataccttatgtattataaaatgatagagccatgcagaatcttaagagatcatttgatttagcctcactgcctttcaaataatgtgacatctgaggtccagaaattttgagagacttgcaaaatgtcacatctagcttctggtaaagctaagacttaataatctagaatagtgttctagttttgaaattcaggaaccttacatttttttcctttggctcagagttttagaattatgtgatttaaaaaaaatgtgctatgtaaatagggaattcattcaacaatgttgattgtgcatctaccagatgctgtgattgcagtgagaggtaagacacgtatggtcacgtggctcatgaaacttacacttttgtggaggaaaccaacacaaaattaaaataattaccagttattatcattgctgtgaaataagggttcagatagaagaataacagaggaacagctacttaagaagtacggtcagaggtctcctaggagataggcagaagataacctgcatgtgaagaatgcatggaaagagtgttcagacataggaaatagcacatgcaagggttctggaagcttccacgttttaaatttatttatggcctcctatgcatcatgtactaaataatcatacatttactataatttctacttactgaagtatgtattgcttgtttgctcaatggtattataaacataattgtatagtattttacatagtgagaccagcaatacatttttttcaataattattgaacaaaaggaacatgttcatatatgagagattatgtcatagataaaggctgaaatgggattaattggaagaaatgaatttttctaattgatttcatgatcagacatgttgattttaaaatgttaggactagagacatacaccccctgcaagtctcattatccttaaaaaccactaaaaatcaaaaccaggaaatttacgttttaatcttattcttggtattaagatagtgtctctgagtatctaattgattgccagcatggtacaatacagtagaaactttcaagtcctgaaggggaataaaaaagaccttcctccaaaacagattatttgggtaggcgcccaagacatatgagaagataaaaacctgaactcagttagtgtaaccactatggagaacagtttggaggtacctgaaaaaactaaaaatagagctaccatgccatccagcaatctcactgctaggtatatactcaaaagaagggaagtcagtgtctccaagagatatttacactcccatgtttattgcagcactattcacaatagtcaagagtccgaagcaacctacgtgtccatcaacagacaaaggaaatgtacctatacacaatggactactattcagccattaaaaaaagaatgagatcctgtcattttcaacatggatggcactggaggtcattatgttaagtgaaataagccaggcacagaaagacaaactttgcatgttcttgcttatttgtaggagctaaaaattaaaacatttgaactcctggagatagagagtagaaggatggttatcagaggctgggaagggtagtgggaagtgctgggcaaatgaatgagacctgatatttgatagcacaacagggtaactgtagtcaataataatttaattgtacattttaaaataactaaaagagtataataggatagtttataacacaaaggataaatgcttgaggtgatggataccccgtttaccgtgatgtgagtataacacatcacatgcttttatcaaaatatctcatgtacttcataaatatatatacctattatgtacccacaaaaataaaaaatgaaaaaattcctcacctcaccagaggaagcgtgatgtagcagcggtgatacatatttttaaattaatttttttattttgagatcattatggattgacatttagttgttagaaataatacagagagatcccgtgtaccctatactcagtttccctcaatggtagcatcttgtaaaaccataaaataatatcacaacccagatactgacattatgcagttaagatacagaacatttccatcactacaaggatctctcatgttgtacttttagccacacttccttcagtccatctacctccttagtaacccctagaaaccattagtgtgttttttcaagaatgtgatataaatggagtcatgttgtatgtaaccttttggcattggctttttattcagcataattcttcagaaattcatccagctactttcattcctttttactgttgagtagtgcagtgttccatggtatgtgtatcagtttcttagggctgctgtaataaaatactgcacagtgggtagcttaaagcaacataattttatttattaaatttattctcagttctggagggtgaaagtatgtaatgaggtgttggcagtgttggttccttctgagaactccaaaggagaatctgtttcatgcctgtctcctagcttctggtgatggctgacaatccttgacatttcttggtttgtagaagctttactctagtctctgcctctgtctccatatgaccctctgcctgtgtgtctcttctctgtatccaaattttcctcttcttataagggcaacagtcttttccattaatggcctatcctactcctgtataatctcatcttaactacatctgaaacaaccctgtttccaaataaggtcacattctgagatttcaggcattaggacttgagcatatcttcctgggggatacaattcaacccctaacagtatggatataccacaatttgtctaatcattcaccctttgaaggatgtttggtttgtttctagtttggagctagtacaaataaaggtctccaaacatttatgtataggtttttatgtgaacataagttacaatttttctggagtaactgcctaggatcacagttgctaattgtatggtaattgtatgtttagtttagttttgtactattacacatttccatcagcaatgtgtgagtgatccagttttttctcatccttgccagcatttggtggtgtcactttttcactatgctatatttgagccattctaaaagatgtgtagtgatatctcattgttgttttaatatgcatttccctaatgaatgatgttctggaacatcttttcaatgtgctggtttgtcatttgtatatcctgttttcgtgaaatacctgttcaacttttttgctcattttctaattggatgtttggttgttttgttttgttttgttttttaactctgcactctttatatattctagagctttatatattctagttctttatatattctagttctttgacacatatgtcatttgtaaatagttttctcccagtctgtaccttgtctttttatcttctcaagagacagggtctttcatagaacaaaattttttaattttaaagaagtccattttaggctggtccgaagagtggataactcaattgattgttcacagtcagttatagattgaactcctcgttttactccttctcccattctcactactgcacttgactagtcttaaaaaaaaagtccattttatttcttttaaggtttgtggttggtgctttggtgttaagtctaagaagtctttgcctagtcctagatctcagaggtttttttctcttttgtttgttttttttttcttttttttttattatactttacgttttagggtacatgtgcacaacgtgcaggttagttacatatgtatacatgtgccatgctggtgtgctgaacccagtaactcgtcatttaacattaggtatatctccaaatgctatccctcccccttcccccacgcaacaacaggccccggtgtgtgatgttccccttcctgtgtccatgtgttctcattgttcaattcccacctatgagtgagaacatgcggtgtttggtttttttgtccttgtgatagtttgctgagaatgatggtttccagcttcatccatgtccctacaaaggacatgaactcatccttttttatggctgcatagtatttcatggtgtatatgtgccacattttcttaatccagtctatcattgttggacatttgggttggttccaagtctttgctattgtgaatagtgccacaataaacatacgtgtgcatgtgtctttatagcagcatgatttatagtcctttgggtatatacccagtaatgggatggctgggtcaaatggtatttctagttctaggtccctgaggaatcgccacactgacttccacaacagttgaactagtttaccgtcccaccaacagtgtaaaagtgttcctgtttctccacatcctctccagcacctgttgtttcctgactttttaatgattgccattctaactggtgtgagatggtatctcattgtggttttgatttgcatttctctgatggccagtgatgatgagcatttttttcatgtgtcttttggctgcataaatgtcttcttttgagaagtgtctgttcatatccttcaccccctttttgatggggttgtttgtttttttcttgtaaatttgtttgagttcattgtagattctggatattagccctttgtcagatgagcagcttgcaaaaattttctctctttctgtaggttgcctgttcactctgatggtagtttcttttgctgtgcagaagctctttagtttaattagatcccgtttgtcaattttggcttttgttgccatttcttttggtgttctagacatgaagtccttgcccatgcctatgtcctgaatggtaatgcctaggttttcttctagggtttttatggtgttaggtctaacgtttaagtctttaatccatcttgaattaatttctgtataaggtgtaaggaagggatccagtttcagctttctacatatggctagccagttttcccagcaccatttattaaatagggaatcctttccccagtgcttgtttttgtcaggtttgtcaaagatcagatagttgtagatatgcggcattatttctgagggctctgttctgttccattggtctacatctctgttttggtaccagtaccatgctgttttggttactgtagccttgtagtatagtttgaagtcaggtatcgtgatgcctccagctttgttcttttggcttaggattgacttggcgatgcaggctcttttttggttccatatgaactttaaagtagttttttccaattctgtgaagaaagtcattggtagcttgatggggatggcattgactctataaattactttgggcagtatggccattttcacgatattggttcttcctacccttgttttttttttctaaaagtttaatagtttgagattttacatttacatctatgttaactcttttctgctgaggcagtacattctattaatcctagatctcaaaggttttcttctttattttttttttctacaagtataatagtttgagattttacatttaaatctacgttaactcttttctgcagagtcagtacattctatcttcctagaagtaggaggtcttgggatgtagttttataatctggccaaaatgtctctcagaagcaggcatagtaatgaggataccacatggaaacaacaacaataagaacaaaaacatcccacagacagcatgttcagcattctaggtgacagtgtccccataagtctccccccatatttgtgtgagcggctgaatgacgaacagcaacaagacaaaaggcaactgtgtggggcaagcaaaaggaaaggaaaaaaaggccttatggtcataagagcttgatcttggatggttctaagagcataaaaatcaatgaatagtcgtcttttaaagaaagtgttcctacttacagtggaggactccatgaacagatatttaaataacacataaaactggtagggggctgtattagtctgttttcacactgctaataaagacatacccaagactgggtaaattataaaggaaagaggtttttttttttttttttcccctgcatcataaattttattcctgatgtgggacagattccttccatctccaaatgaatcacatgctgcccctgaaagacctaggaaactcttccaccatctccagggaagtagcaacaaaggcaggtgctggggactggaaggctttgaagttttccatcctactttttctcaccttctcaacagaggatagctgttctctattattcctctcatccactcatcccttaaaaaaccccacaaaacgatcattagtaaacaaacaaacaaaacctcttcaagtattgggcattaggggttcaggttgggacttgggggtcaccaatgaaagaggaaggggaagaggaggaggagccatcactgtttctgctgcaagggttccttccttgctgcatcctgtagcaactgtttgtggacctcgtctgctggcaactgcatgtatcggaccactgagccctgaatgaagcagttcttcactgataacatgtgaggatatttctcagagtctatgacactgatattagttagtttgatgttgagataccgatccacagaatggagggttccacagatgctcaggtcattcttgagttccacgaccacatgcttgccctcaagggacttgaaaaaataatagaagagcgtggtgctggtcctgcgggctggaccagaaagaggacaggggaaaggaaagaggtttaattgactcacagttccacatgcctggggaggcctcacaatcatggtggaaggtgcaggggaagcaagacacgtcttacatggcagcaggcaagagagagagcatgtgcaggggatcccccttatgaaaccaccagatctcatgagactcacgtactgccgcgagaacagcacagaaaagaccccccatcatgtttcaattacctcccaacaggtccctctcatgatacgtgggaattaggggggctacaatttgagatttgggtgaggacacagccaaatcatatcgggctattcaggttcccagtgaggattagagaaaatggattgttgtagttagagaatcagttattagtgatttttaaaaattatacaaatgttttagaatcattttggaagatcccatttattatccagggtaaaataaaggtgaaataacagtaaagcatagagattggaaacatcatgagaagtcacttgttaaaattaagctgtttctctaaacttgagaatatatatgacttgaaatcgttttttcaaaattttaactttttataatggtttaatcttttccttttaaatgaacataaaatggatatgttgtctatcagggtttgtattactttcatcttgctgctgtagcaaattgccacgagtacagtagcttaaaacaacacagatttattctcttatagttctggaggtcacaagtcagaaatcagttttactggcctaaaactatggtattcctagggctagtttcttctagacactctaggggagaatttgcttcctttgccttttccagtttttagaggctgtcctcattacatcactcttggtcccaagttacactgccttttcttccaccatttccattgtcacatcaccttttctgacattgttcatcttgcctccttcttgtaagtattcttatgattacactaggcccacctgaataatacaggataatcggacatctcaacatcctcaatttaatcatatctgaaaagtttctttgccacgtaagctgacaaacactacaggttctgggcataaggatgtggttatcttttgggggacattattcagctgaccataggtttaagagagtaaaatgtatattatttacttccataaataaatgtttttgaattatattcagatgttcagttaatatttacttgccttgtgccttgtcatttctgatttcattttgcaaagtttatttttattcttttaaattttttttatttttcctggtagtctttatgaaattcgtttgtgtaaaattactgtaacaatactactttagagtattattattttgaagtatacctccctgttgattttgcccacatttttgaaatcattcacctttttgtgactgatattccggaagtacatgaaaatatatttttccactttaccttgtatgttttaaattatttcttatattgttgtcattgttggagtcttttttttttcttggtagctaggagatgcaaagaggaaaccctctggaagctttaagtacataatgggtgcagtcttttccaggacctggtccttagaaatttatgttcacaaaagtgattcttttaaaaaatcaactttctttcaagagattactgagaaatcagaaatgtcaatttattattaaaaagaagatactaactaataaataaaccagcatgaacttatgaagaagtctgtggatttagaacacagatcacagactgttgaatgataatgatgtaaatgctgattaccatttattgaattccactggagaggtctgtcttctggatattactaggtctctcacaaatgttcttactcattagttttacttttcttagacttttttctctactgtttgttaggacactcacctgaaacttgttacaataaggagattacagctttctttatagcagtcactgaggttgcactgtgctcaattaagtttgaatttagttttcaaaatatccatcagcatcatatatataaataaatctctcttagtgtgggttacttttgtctgtgaatatttattcagtttatgttgagacttatagtttaaatttaagaagatagtattttctgaccttattttccaattttgacattttgtctaatttataatctattgtctcttacatattaataacttactttcagcagtgcatggcacggtcctttttggaaattattgtaatatatagtgtgggctatttccagaagtatctaccaccactacctgtttacacgtggcttcaatgtgggtgaattagtttgaaattcccattgaaggcagcctccaagggttaaaaagtcacagtaagacaacctgtggccctgtactttaaaggagggatgggaaagtatactgtatttatattggagacgttggaaagatttggagacctttgttttactcattcctccagttacatcttagcccttagtccttgtcatagtagtttcacttgccgccagacacacatccctcacaacatatacacaagctttgtgtccagactgtcaccttgattttatttattttaccctaggcacagatctgaccctagctatattgcctttgatacttaaagtaaatttaagatcctgcttctgttattttaattcattctaggccctatacctctggacctaagtgtctactctgtgaggtatatagtttagctaaaataaaatgaatgccatagatcataatatatttgaaagcatcttgaatttggatttgactccaaacacttcattatattttgttaatgctagcatgtaataaatactgtgataacttaaaatctgcttagtttcatattttttatgattctaaagggctcttataaaaatgaaatcaaagaaaagcataatttacatatatgaggtttccttaatgtcttcttaatgaagttgaaatcatttatatttattctcttttagtattgtgcttctgctaagccaaaaacaggcacttgaagaactgaaacagtcagtccagcagctgagatgcactgaagcaaagttttcagcacagaaggaattactagagcaaaaagtgcaagaaaatgatgggaaagagccacctccagtagtaaattatgaagaagatgcacgatcagttacatctatggtaagctaaagaataatccaatgagaaacttggaagagtagtgtctaggtaataagtgcatacaaaaattatttaaatttgctataacaaattgttactcttgttaatatgcaggtcctattaaacttgtttgtaaatgcaaaatagacttgtcagtcacctcaggtcacctggagagcactttcaggaaccacctgtagagtcagaggaaaaagttcttctcttgccttcaaaactgaaaggaaagactgcagttgtttttattcctgggagacagcaggaaggtagggtcttattcttaagagagaagtaagcaataagaagaaagctatttattgatttttttcttcttaagtagaatcttatttatctgagattgctggtgtatttattgcttttaaaatacaaaatattgatttagtttaagaattttttttctgctcataaatgtgacccttagactacaataaatacattcaaattcaccaacttgaaattcaactttatttcatagttttattaactgtttaagaatgcctagtataaagtctttcttcttctctcctttcctttccactcctctcctttcttctcttctttgctcccctctctcctcttcctttctgtcctctcctttcctttccttcctctttctctctcctttctccttcttccttcctttccctcccttcccctccccttcctcccttcccttcccttccctcccttcccctcccctcccctcccttcccctcccctttccttccttccttccttcctttctttttctttttctttcctttctctcttcctctttcttttctctctcttcctctttctttctttatctttcctttttctattatctacctattgatctatctatctatgtatgttggtggttctcaccccctgccacacacatacctgggacatttggtagtatcaccagacactgtgattgtcataaccagatctagtgggtagagattggtgatgctggtaaacctcttagaatgcacagaacagcccctcccttcacactcccagcacaaaattatccaggctaaaatgtcaaaagtgccaaggttaaaaaagtctgagctacatccttggcatttcctgtgggtaacttacagaactattatagttatgctatagctgatattttagtactttttactttatgttgttctaaatagtatgatttgattaagtgggttcatatgtctccatagcaaaaaaaaaaaaaaaagaccgtatctgagaatacggtaaatgtagtaatgaatatgaagtatttaaacaattgtggttattactattactattaaatattaaaattaaactattgtggttgttagtaatattgagccatattaatctacacatcactttgtgaattgtgaattatgaatccttgcactctttcactgtcctagctataaggatctcagcacatgtaccaaggaccctattaaattccctttcttgcttcatgattcttgataagtatctggcatatgtgttctttcaaaggaacttttgaaatgttttccttttgtttggctttggaatatcttatctagtaaatcttttgttcactgagtgtggtttataatatttccctgttaccatgacgttgtggaattggttatttaaaggcttggctgggcgcggtggctcacgcctgtaatcccagcaccttgggaggccgaggtgggtggatcacaaggtcaggagatcgagaccatcctggccaacatggtgaaaccctgtctctactaaaatacaaaaaaaaaaaaattagctgggtgtggtggtgtgtgcctgtaatcccagctactcaggaggctgaggtgggagaatcatttgaacctgggaggtggaggttgcagtgagctgagatcgtgccactgcactccagcctggtgaaagggcaagactccatctcaaaaaaaaaaaaaaaaattctgatcatctggagtttaatatttcataatcattgaagaaaagttttgtttaactaatgaatagataatgtttctgaggtagtgtatagtgtagtttaagagaatgaattgccttccggcaccttcaagttctgctctcgtgtccattaattcaatggtgataatacttaatatatttttacaagatggtgctgcatatttcattttatcaaatttattttaaattgttgaaatactaattataaattagatcttgcctatttgctgaagcaatgcttttagtcattaaggatttttttgtaaaagaatactataatatatgtagtttaaagcaataaattaatattttacaaataagacagggcattcttacaaattaatgccagttaatgagattttacagcattttttcagaacaattagaaatttttacaatgcccaattcctaaaacttaagaatacatctacatgtgtcagtgaaatctttgtgtaattcagtttttcaattaataattagaatattacttttcagtttacttggaaacgaaaacaatcaaagctttaaatgattttgtccccaaatgactgtttaagcattgctttatgaataatgttacaagaaaagcctggaattcacataagtggttctattggtattttctctttataaattccattgctataaatggtatacaatttcaataagagacttatttgaatattggaagaattggaagaactcaaaattaaactattgtatcatggaaaattgtgaaaatttgtgtaaatattatttgagagcaggagagacaatgaattatgctccatgatcttagttaatggcagtgttactgaaaataccgactcttcggtggtgaatgcttctgtagaagagtgctttaaggaactgtaccattgaaatgtgccatgcattgggtattcttataaaggttccaaatgatcaaatgtgtaatcagggttggggttgtatagtcaagttcttagtgtttgatgtttattttgtcttagtcttgatgtttattttagctctatgagtcaatgagagttaaagctcattgttacagtttaaacgtttgctctctccaaaactcatgtggaaatttaattgccattgtaagagtgttaagaggtgggacctttgagaggtgattaggtcaggagggcttcatccttatggatgtaattaatgtctttataaaagagggagtttggctcccctttacctctttgcccacctccccacccccgccatgtgaaaccaaaggattcttttcctttggaggatgcagtcttcagtggtccatcttggaattggagattgggctcttttcagatgccaggtctgctagcaccttgatcttggacttcctggaactgtgaaaaatgaatttctttcttttttttttccttcacaactatgctaatgaggaaagctgtggttatgctagataagtatgatgaattaagtaagagaggggaagaggagtgaagatgcatataagaaagtgattataatgattaaagaattaaagctgtgtaataaagacagaggccatcaagagaggaatggagtataaggaaaagtgctttgaggagataggttgttaaatcaggtgattatggcataataggttagataatagaatcttaaaattttggaatttcctctagccagtgacagtaagcagaatcagaaataaaagtgaagcatcttcaatggcacacctgtaagggaatataataaataataatcactttgtgtctaccacagaaataaaaccctgccattttataaaccttaatattatttaaaaaataattttggtagactggatgtagtggctcacacctgtaatgtcagcattttgggaggctgaggtggatttactgcctgagttcaggagtttgagaccagcctgggcaacatggcaaaaccttgtctctacaaatatataaaaattagtcgggtgtggtggcacatgcctgtaatgctaaccactcaggagtttgaggtaaaaggattgtttaaggtgtgtagtttgagactgcagtgttccacgattgtgccactgcactccagcctgggtgacagagtgagagccagtctcaaaataaaataaaaataattttggtctattagtagagtaacctttaaaaaccataaatcacagttttaccttatttgcaaaggttcactctacttctctgaacttaacagagtgtttctaaggcttaggataacattggaaagattagtcttttctgttataccatcaagcttatagactaccggagggggaataaattcatttgaactttggcagtactctattaaagaggaaaaaaacgggctataagaatacacatctttagagcatttagagatgatatctttgagaccattataattacaaaaggagaagtacaatgataatttatggaaggttttcctagcaatgttagtcatatttattttgctaggctggcagtagtactagtctgagttttgttgtattgatttgattcattagattagatctttattttctctgtgtatttcccattagtttgtgggatgttaagaagtgtaccatggagaagtgagttgcagaatttgagtcatgttgggtgaagccaaaagaaacagtaatattgactgcaggaactttctaagcctttaatattaaatgtccaagggggaaatagtatatgggatgcagtgtttctgaaaatattgtcccaattccctttcaaggagcctcctgggaggaccatagtgtaatggagcatactttgggaaatgcttagttagaagataaatcctttcttattgaattgggataatgacagattaaatgtctaataattctgaagaattttgaattgcttatgtgttgttgaatttaaggattattttatataatagttcaattctagctctttggggtagaagaatctgccttctggagcaaattaggagggtgaactctgttgactcacagtgatgagaatatcaaaattttctaatctccaagtaaacatcagctgctttcttattatatttatttatttatttatttatttattaagagacatgttcttcattctttttttagttatctagttgtaagaacataataaatattcaattagtatatgctgaattaaataattggacttcgttttcccttcagaataatctggttatttaactttatgacaatatatgctttggaccaaacatataataatttttgttgaaagagtctcccttatatgtcagatatgtctagaatttatggcaccataaaatgaatttctactttataaatgtaattagctagtctgtatgataattgcctttgtttctgaaattgcacattttgtttaagcccttttgctagaccaacacacaacatagatttttcttctctgcacatgttacttagttttgcttaattgagcagcagtatcagtaaaatcctattttgttacattttcaaccaacaacacatttaatttgttggctaaaaattgtcaggccaggcctggtggtttgcgcctgtaatcctagcactttgggaggctgaggcccgtggatcacttgaggtcaggagttcgagaccagcctgaccaacatggcaaaaccctgtctctactaaaaatacaaagattagccagacatggttaagatcccttaacctttctgagttttcttttccgtagagggaggaaatgaatatatacctcttttgccttacaggatttctgtgacactgaaatgagataatgtgtataaacatattttgtatattataaaatcctgtagaaaaatatcagcttctatttcagtttttctaaaaaatgtaccttagtttacaggtaaattaattgatattcactgagttcttaagtatgaattgtagattttctgtaagattattttacatatttcttattcataaaggaaaaaccttaatttctttggataggtagtacatgcacatttacatgggtctaagtgtcctttcttagtgtcccagttctcttccttagaggtaatcttccagaagtgttgtatgcaaataaaaacacaagtgtaaatgatatgcctgctgttctttttacacaagtgttacagcatacaacagtagtgttctgtatcttgcttttttacttaatgcatcttaggtatcattttataatagtgaatgtacagttacttcagttttttttcatttatccattcaaaaagcaaatatttattgaatgtcaggtgtcaggtatcattttaggttttggggatacagtagtgaacaaaatagaatttgttttcactgttatgggccttttactctaattggaggggacagtgaataaacaaacaaataaatacatagtatgtcacatggtggtaaattcttttgaaaaaaagcaagattgggggcaataaggcaatgagtgctgggagttatttttatacatagtgtggttaaggaaggattccttgataaagtgccatttgtgcagatatctggaagaactgagagagcaaatgagactgcttggggtgagaatatttcaggcagtgggaagagcagatgaaaggaggaaccaaaaggaagccagtgtagctgaagagagagaaagtaataggagatagggtctgagaagtaatgggcagttagatcataaagtcatacagacccacgtaggacttcagtgctaattcatagagaaattagaaatcattgagcgttctgagtgagggagtgacatttttacatggttttcaattttttgttgtaaatacatcttcagtgaaaatccttgtaatactattgtgtgtagtttatgtgtaagatatattttaggttttgttcagcttatataggtttagattttactgtcaaaaaagttgaaaagtttctgaacctgagaacaatgtcagttatagatattaattataacattaatatttcagttttgtagatgagtaaatttttgcttccagcttttctgtggcatgaattttaccatgctgaacttcagtgtcttaacaaaccattactattattaaattcttctatggctctgacacctaaagtatatttacagttgtatgttatactgtatataaatttgatatataaatttctaacttataaaacaggtaagctaggaggtgattatgattataatcattttccaaatgattcaggtcaagattccattcatcaatagccatttttctttggctcatataaatgaagtcatttcatatcacgttagccaatggatgatgccagaaacactctttttcattaggccacagtatcttcagtatcaggagagaaaaaacaatgcttaaactttcaaagtgttttttagcttatattttaactgttatctgtgttcatattcatatgaagttgatatataggccaaaatgaagtaaataaaaataagattttccatttggttttggaaaaactatatgtatatatttcaaatttatcttttaaattatgaatttcttaatttcttagcataaactaactggccaggggtgaactagccctagaaggatataataaaaggagagagaagataaagttaggtaagaattaaatatctactatgattaatgcaaataaaaagaattcctcagatttatttattcagtcacttgggattcaacagcgcttaatgattacttaccacaggattattatgtaatggggttttttgggaaaggtgggtcaaagagatttagaagctgttacaggatttggtcggagacatgaagcacaagtaattgatttaacagttaattgaaagttggctgaattttgacttgtatgtatttatacattaaaacattttttaaacttgtgtttagcagtacctatatatatactcagtaaatgtttatagatgaaatgaataggtacagaatttcaaaagcaggttaaaattgatgtaactcaatttttaaaatggtttaaatgttaaaattgttttcatcaagtatttcccactttattaataagtaattgtggcaatggtattctaacagggtgaaaaaatctggagtagttacagagataatgactaatgagtggttgtgatagaatctttgctctagggagagccccagctatagagccagacttctttggtttgagtctttgcctcaccacttaagtaagtgcagggtataagccaagttatgggactttttctgtccccatttcccagtgtgtaaaatgagattactgtgttacccactcttgggtttgttgcaggaatagttaagtttatacatttaaagcatgcagaacagtgcttgtcacttagtaaactagtattgtctaatatttgattatttgatgaaacatcacagaaacaataataagttaatgtgtgtgcttacttttttgctggtctttttttccctgttcttgatgttattttttcattaagcataaatccttccttttaaaaatgcaaactattaatttttagatgataggtaagcatgtttgtgatctactcttctctgtacttgaaatattgttgtcttttagccacaatagattggaaaacattttttaaaaaactgtcatgtaattaacttacgacttatgcattacctttataatagcccttttatgacgttattagagttgatcagctaatttttcaaatatttttagtgttactagtttattagaagtctgcttttttcctttctcatacattattaaagtttgtgtttaaatttttacatgatgcaatttttataaaaaatagtacataatcccattattttaatgttacttttatagtttaatttgaatgaaagaaaaaaatccctaagtacaattatatcttaagattattcattactaaaataatatatatatatgtttaaatttgctgttatggaaaataacagcttttgatactcataatacttccttttaacaattctcctttctgccatcttatgcaataccatgattttattcattctaccagttgaaacctgttttttccatttcctttggtccctttctctcagtattgttcaaagtctatctttctaacagtggtgtagggtggaaaaaattgtgggaattggagtcacattatcctgggtttaattgcctttaggtggattttcacccgctaaactacaatgtcttcatcggtaaaatctaattaataatatacacttcataggattgttggatgtatttatgaatgaatgtaaaaacaatatacagctccagatacaattaggaaggtgcttaatgcacatttggtttttgttccttttatttcccctttttctccatttcctttttccctcttttttttgtctcttccacctttttcctccctcctctgccttctcattaaacacaattagccaacttcttttcttttcttttctttttttttgagatggagtctcactctgttgcccaggctggagtgcagtggcgggatctcggttcactgaaacctctgcctcctgggttcaagcaattcttgggctcagccttccgagtagctgggattacaggtgctgccaccacacccagctaatttttttgtatttttgatagagacggggttttatcatcttgttcaggctggtcttgagctcctgacttagggatccacccgcctcggcctcccaaagtgctgggattataggagtgagcccctgggcccggccacagttaaccaacttctgtaagtatctagtgccatggatgtagataacctggaatagtagacagagtctctgcactcttagatctacattcagcaagcagaaaattgcaataaacaaatgattaacaagaaaacatcagatagaactaagtactctgatgaaattaatcattaatattccttaggcttcagtatttaacactcagtcttcagtttgttttcttttctttgtattcaggtatcagtggatttttttttcttttgtcatgatttagacatcaattgattgacacccaaatgtacattttcgagaaaattgagagtactggaataccactccagataaagacaaaaaatgaaagcagagagaaagttaagtgatttaagcaagttcatgcagaaaaggttaaatgtagtaaaacattttagtttattgagaacaatttcattattatttatataccaattagattttcttcctttgattttcatttttagattaactgtttacctgatagaggtagtattacctggcgttcgttttgtgttaattaaaaaacaaaaactttggactatgatgatgtagcttaatgcggatatattgtttgagaaactgaacagaaatttaattaccggaaaaaggaataaaagatatttaaatgcatggctaatttgctgtaataactgttaaaaaattttttaaaaacctttttccttcccttacattgctataacgaaataatagctgttaagaatgaaattgctaaagaaatttctattcatagattaatagttcttttttctgcctatacaatagtttttgggtgctcattaaaaaatattaataaatcaatcaaaagtaattacttggcatataaaccatcacataacatgttcaagtcattttgttacgatttttaaaaataatttcattttcttcaacctgaaaaaagtcattccagcctatacaatttggttgctaatctctctattaaactgtgtagtatttgttttaaaatttgtatttgctgaggcaggagaatgctgtgaacccgggaggcggagcttgcagtgagccgagatggcgccattgcactctagcctgggcgagtgagcgagactccgtctcaaaaaaaaaaaaaaaaaaaatttatatttgaaggccaggtgtggtggctggctcatgcctgtaatctctgtactttcagaggccaaggtgggtggatcgcttgagctcagaagttctagactagcctgggccacatggagaaaccctgtatctacaaaaagtaaaaaattagctgggtgtggtggcacgtgcctgtagtcctcaggagactaaggtgggacgatggcttgagcccaggaggcagaggttgcagtgagccaagatgacatcactgttctccagcctgggcaacagaaccagaccctgtgttagaaaacaaacaaaacaattatgtttgaagatgttctatctggcggcttaattgtgggtagatttttgacaatgtatgtagtgaaggatttatatgtttttgtctccaaaatcttgtgtcttgaattttgataattattttatgacattaatttctttaactgaaagtttttataaagagaatgtgtgaatgttatgatttattgcttcatttggtaccagatgaattttaaatccttttttttattatagtattgtgcagaaagttgtttctcattatacatatttaaaagcttaaggatccactgttaattttttaaatcatcggtttacttcgcaaatcacagatgaaggatgtgatctgaaactaaggaaaggttttctctatcacagtgtatctagagatctttgagagtagaggctaagttttcttgaaaattctcaaggttgtgtaaaaaaatcatttgttccttggaaggagaaacaactcattccaaagtatcagttacacttctattctatatttaactatatggtatatgttgtcagaggactgtaagaagaatataaacaaattcagatgtttaaatctgtcttctttttgaaacttgaattaatgctgtcatactggtgatgttagaaaaaaaacatttgaacagctggaagggtaccacatagttaagaaacaatcttcggacagactaatagagaagaatacttcggtgaagtaaactccaatgtatatgtatttatatatgtatcatatatatacttatatataaataaaataatattttgaggaaaacaaaactttttatgttggataaatatcaattttgattttaaacttatgctacataaagaggaaatttcagatgtattaaatactcaaatatttttaaaaagccacaaaactactagaagaaaatattactgaacattttcctatgttggaaaataaactgaattaaaatgcaggataaaaactgggaataatatgtactgctcttgtgacaaagtattaatgtttgtaaatatataagtagatcatccaaattggtttagaaaaaagtaatgcaccaattaaaaatggacaaagattatgaataagatattcataatagattaaatataaatttttgtaagatatttaaaaacttttcaagccactagtaatgaaaataatgattaagaaatgcaattagaaattaatgaactgttaaacttgtctatcatcatctacagtggcttccttcgaacctgctctctactctagccaaagttatcttttaaaatttcacatcagccagtctggttatagtggtctcaacaagaatgggtacagtggctttttatgactttcaggtgaaacaccaaatttcttgaccacacttagcataatttccctattctttggaaggcttttactttttttaaaaaaaaggtttgtttaaaaatttaattccattttagattcagtaggtatatgtgcaggtttgttacatgaatatattgtataatggtggggtttgggcttctagtatacccatcacccaaatagtgaacattgtaccacataggtaattttcaaccccctccgcttctcccacttcgccctttaggagtccccagtgtctattattttcagctttatgtccaatatacccattatttagcccctgcttataagtgagaacatacggtatttgattttctatttctgagttttttcacttaggatgatggatcatggcctccagctccatctagttgctgcaaaggacattatttcattattttttatggctgcatagtattccatagggtatatataccacatttcctttatccaatcaactattggtggatatttaggttgattccatgactttgctattgtgaagagtattacaataaacatatgagtgtaggtgtctttttgatataatacccagtagtgggattactgggtcaaatagtagtagttctatttttagttctttgaaaaattctccatgttgttttccatagaagtttaactaatttacattcccaccaacagtgcataacattttcttttcaccacatccgcactagcatctgttgttttttgactttttcaacatagccattctgactgacgtaaaatgatatctcattgtggttttaatttgcatttctctgatgattagtgatgttgaggtttttttcatatatttcttggtcatgtgtatgtcttcttttgagaaatgtgtgttcatgtcgtttgcccactttttaatggagttgttcatttttttcttgtgttgtttcagttccctatagattctggatattagtactttgttagagtcataacttgcaaatattttctcctatactgtagattgtgtgtttgttctgttgattatttattttgatgtataaaaactttctagtttaagtctcatttatctatgtttgtttttgttgcatttgcttttggggttgttgtcataaattcttcgtgtaggccaatgtctggaagagtgtttcttaggttttcttctggaatttttatagtttcaggtttacgtttgagtctttaatccatctcgagttaatttttgtatatggtgagagataggggtctagttttattcttttgcatattgctagccaattttcagagcaccatttattggatagggtagcctttcctcactgtttatttttgtgaactttgtcaaaggtcagttggttgtaggtagatggctttatttctgggttctctgttctgtttcattgatctgtgtctatatttgtacaagtatcatgcagttttagttatgatatggtttggctgtgtccccacccaaatctcatcttgaattgtagctcccacaattcccacgtgttgtggcaggtacctggttggagataattgaatcacgagggcagttttccccatactgttcttgtgatagtgaataattgttacaggatctgatggttttataaggggtttcctcttttgcttggctctcattctctcgtctgctgccatgtaagaagtgcctttcgccttctgccttccaccataattgtgaggcctcctcagccacttggaactgtgagtaaagcctctttttcttcataaattacccagtctcaggtatgtctttattagcagtgtgaaaacggactaatacaagttactttagccttgtagtataatttaaagtcaggtaatatgatgcctccagatttgttgtttttgcttaggattaaacaacaaatttctttaagtgacctgcctaaagggtttaccttgtctggctcctaccatggactttttttgttttttcttgagacagagtctcgctcttgtcacccaggctggagtgcagtggcacaatcttggctcactgcaacctctgtctcccaggttcaagagattctcatgcctcagcctctcaagtagctgggattacaggtgcccaccaccaagcctggctaatttttgtatttttagtagagactgggttttgccatgttggccaggctggtttcgaactctgacctcaggtgatccacctgcctcgaccttctaaagtgctgagattgactacaggtgtgagccactgtgcgtggccctatgaactcttactaatctgaatggatactggttgtaatcacagacatgacgctatgaaagaagagcaaaacaagaaaggaagatataaggattgaaggcctgggaaaaaaatttggggggtattacctgggctggttgtatcaattcagttatgaacaagtgtagttggagtaagtagctatcaagtgtggtctgaaatcttacaagtgaagaaattctgactggtaagttccaagttaaaaatggtagaatgagttactgaagttgagcctagatgagtactcttggagatgaagccatccaaggaactttgaggccttgggtataagaatcatttatgatattgttgggggttgagctggaaagaaaataatcttaagctacttgccaaatacaaatacctcagtaaatgaaagggagtgtctgagaggtagatgagagtattgagaatgtaaatatccacaaatggtttcatttatgctattattatacctactgcatctcttataattattttctatataaacttttactgcttaacacagtacctggcaaagagtaggtactcgataaatttttctttgaacatgcttgatattgcaaaatgaaaccatcagcatttaggttgcagtttttagttaaatgtgtgactcactctacatattccttgtatataaataccaaacaaaaacaaaacactaagctaatgtataggggtaaattagtctagtatctgtgtgataaagtaataaactcataattctgacagaaaggaaaggatgcagagtgatagtcttgactaacatagctatcatttatagataggcaaagtagaaatttggcatactgtgttatttaagcagggccagaatgaactatgtcctctaaaatatcttagccacaaccactactttggaaagcctattgggcagtgtctactaaagaaggaaatgtgtacaccctgtgactcagtatatctgctcctggatatatactcaatagaaatacatacatatgctctcaaaaaggcatgtacaagaatattcacaggagcacaatttataatgaccccagctagaaactgtccagatgtcagtcaacagtagaatacataaattgtgggatacttacccaatgggatactccgcagtaatgaaaatgaacagattacaactacatgcagcagtatggctgaatcttacaaaaataatgctaagtgaaaagacaccagacattacatattctgtgattccatttatatggagctcaaaaaaatgtaaaagtaatcaatgacattcgattttagaatagtggttccccttggtagggtgggtgtagtgactgaaaggggccacacaagacacttctagagtatagacagtgacttgtttcttgatctgtgttctggttacagggactttttcaatctgcaaaaatttataacctgcacacttttgatttgtaaactttgctatattcatcttgtacttcaatgaaaaaatttagaaaaaaattgttctaacttagcataggaccaaaatgaaagcatgcttaacttgtctctctgtgtgtgtgtgtgtgtgtgtgtgtgtgtgtatgtgttagattgtgtgttgagctttctatggctatcttttcagaattatctgggagaaggaggagctttttaaaccatatatgccatacttacttttctctgttaccgactctctaaccattattattacgtttcttctatggactatgtacctcttattctttctcttttactgagaaactatagttcgctattatttttgataacaaagtgttgtattcttcagatctcttgtggttgaaaaataatgacttttgggcaaaggatttttgtcttaaagatccttattaaattctgaatgcctcttggagaagtagcatgttaagcatcatcagacattaatatgtacctcaattcaggggcttgaggaatgcaggagcggtgaaatcagcatggaagtagatagcacaagcatgtgaaatgatactttgaagtagtctttattctgataggcaggctagtgaggggcatagtgctggaagggaaggtgagaagttgctgatgattaatttagcccatttcacaaatttgtgtaagcctagctcttcccttttcaaaagtaatttaggttaagataagtatataggaaaaaataatttagaatagaggagaaggcttgggaaaagctcttgaaattttggaaagaagaactcatttcttttctgtggtatagccaggaatggtggtggctacagggtttagcaaggacaaggaggatatgggttaggcatgtaacttggaaggagttgaagtaaagtaggatatggattatgaaagacacctggtttcagaagtcagtgaacaaaggactaagaaggttaggtagagatggaatccagttggtaagaaaaagctttagttgtcttttgagagatttggttaacctaagagtctccagaaccttagtcattacaaatagctacttttggcccggcccagtggctcatgcctgtaatcccagcactttgggaggctgaggcagttggatcacctgaggtcaggagtttgagaccagcctggccaatgtggtgaaatcccgtctctactaaaaatacaaaaattagccaggcgtggtggtgtcacctgtaatcccagctactcgagaggctgaggcaggagaaacgcttgaacccaggaggcagaggatgcatgagccgagattgccccatcaatcaaaattgacactccatctcaaaacaaaaacaaaaacaaaaaacaaataactactttctgaaactctggtagttaaatggctcttgtttgtttctttataataaggcacagtttttatggagcctgagcgttgttcttattccacaaaggacttttttttttttggcaaggggataaattactctgtcctaattaaaatttaattttgatgggaactcttttctctcccccagttttttgttgctaaggccattaaggaagaattaagaaagagggaaaaggagatatgtgtcaggagaaaggtagcaaaagaaacaggtgagggaaggaagaagatcagtaaagaaaggtgaggaagatgaaaggtaaagaacagaagagaaagaaaatacaggaatgagaggcagataaaaggacaaacaaaaagggagtaggaaaaaggagatgaagaagagggtctgaggtaagaaaagcttttcattccctcttctttcacttttcccatactcccctgcttgacacagggtactatgatatgacccacttccctcttctctcctgctttactctccaggtttccatttttattgactactgacttgtgaacttttcctctgtttcttttttaaactggagctgtacaaggtaagaattcatagacaaaaggcattgattatatttgcattctcaaattaaaaatatttggaatttaaaataaaaatatttattgaaccaatcttacctaaaggtgtcaaaactcttcctttatagtttaataaaatctaacatatggatccaatttgtggttcagatacttaggaaaattcattattatacttgattcaagttttacatcaacagcctagtataaaatttttagaaaatttgtttatctgtacttacttgattcattccaaattgttgattcccaaagtttttattgggaggtatttaataagataaaatgaaatgggaaatttagatgtttaccttaataatttgggtacccccccgaccccctgccaaacagaaatctgaaatgtaattaattgtagcattggatcgggaggggcctggatgagtatagacttgcgttatatatatagttacttcaattatctattaattatgttgtgggtatttagatatagcttatgttcacagtattatataattattacagatagctgtattttttgatatagtgaaccttttccaattttattacttataaaatattcatagtctttgctatttattaggccccagtgtaggtgtgttattataaaagaaaattgccagaaaactctatcatgttcgctcatgggttggatggcataagatgaaattcaaataatcatgaaaactcttactgagattcgtttttgttctccctttgtgtataatagaatcatatagactttttggataactgccaacaatttcatattatatttgatcatgttttccaggatttaattcctgtattaaatctaatacaaattaattgaacataggattctatattttgatcagttagcattttctagtgtgatacagtattctgtatcatctttcattcatataattgtctttgtgtattaaacatgtatttaatcagaaaatttcattgccagtctttataaaataataatgacaatccacgaggctttcttctattccagagaactatgatacaaagatgatatgtagatacgttgattttgacttttttgctagctatttaactcaacagaaattaatacctatgtgctttctagcatttagaggcctcattttaacttagtggttgctcattataattttaaaattgtgctgaggaattaaatcataattgtttctatttttaagataggccatgcttttaaggtgatggagtaattattgtaaacacttaagataatttggtatatggggagtaaaacaagcatggactagtcacactagaccaatgaaacactggtcttttgttctccacaggaatatgaaagtctaatttaactttttttcagataagtcagtttaagtagaaataatttaatttttgtttgctcttccttattgttttcttgggtgattttgggggatgttgcctctttcccatttcccaaagtcagagacagctttgatttcttgctgagtaggtgtatgatgtgacttgggattataactaaaaaccaaagaacacaagggaagcttcttgtttgcttctaattttccttagagtcaaacaaatgattaacaggaagtatgaaaaaggtgatactttaagcttcagctttatcacctctaagaaaggtagctcagtagaatgaccatgtctgggagtctgaagatgccaaggagcatgatgtcaccaactcttggtaatcaggcttttgttttaaattgttcagagataagactgtgctccctgaataagtaaacctcacattgcagggctttttataaaagatttacatgcttgtgttcatttactcatttatttatttcctgccttactccccagagtatttgaggtagctaatgacaacaacattcaggaaaatataaatataaaataaaatgagaaccaggaacaatgtaagttgtaacaggatatcaagactatagttcataggatgtatgtatagttactaccctagagctactattttgtctctaagctttccaaaggccaaaatgaaaagggagataaagtcatataacactcttaaataaaagaaagcatgtcacattgcaggggaagcaaagcttttcattgtattgagccctgatagaatttcttactggaggctttcattctgacgttcttagtggcggtgcccttgacaatatcactaaagctaatgtaggaaggagactcataagaccatctcttgcagaatctagaatccatcagtgaaagtggaggccatgacatcaaaatcattctatgtgggcctaagaatgcagctgtctctaaattgattttatccaataatataatctagacttagaataatgggtagtggactgggtgtgtgttttttcttttttttttttttgagatggagtctcgctctgttgcccaggctggagtgcagtggtgcgatctctgctcactgcaagctccgcctcccgggttcacaccattctcctgcctcagcctcccgagtagctgggactacaggcccccgccaccacgcctggctaatttttttgtatttttactagagacggggtttcactgtgttagccaggatggtctcgatctcctgacctcatgatccgcccgcctcagcctcccaaagtgctgggattacaggcgtgagccaccgcgccccgccttggactgggtgtgtttttaacaatcctttcttagtgtcatttctctcagctaaagtttggatatgcaatggataattgtattctgtgtggagttctcaattgtattctgaggagagttctcgattgcagatattctatacttgtttgaggctagatctgtaaaattagtaggatttgttagttaattcattagctgagtttcaaaaattttgaagctgtattttaaaacaattagataatttctgtgttaaaaataatgtttatatttgtgaaattataactcccacaagttattgaaatcacttccctttttaggattaaaaaatattactgatgattgaagggtaattttcaatgttaaacttcaacttttgcttataattttcatgttacattttactcattgatatcttactatttctgcttgttttttttttttaaatcagagttggatcttgtaattctagttggttattcttgatttcactttgtagatttttttttatggctttatagatgatcagtatttctataggttttagagatgagtaaagagtacagaaaatttagctattgtatgaaacatgtcctattttggagggagggtttttctaaacaagtttatttagtagctattaaaatggaaaattttaaattttccaaaagattctttgagagatacttaatttgattcattgacatttgtcaataaggcctcatatcttaagtcattttaatgtgtcatttaacaaaacttactaaaagaactaatccttaattactctttactgtgtgctaaacagtatgctagatatataacatactttatttactactggcaaacagtcctgcaagggagttattccagcctttcagacaagaacattgaagcttgaagagattaaggaactttatcagaatcggtgtggcagattcaaactcaaatagaaacttcttgacaatgaagtttctattttatacaatcagtgttgcatgattactaagccaacagatgtgtaatcagagggactttagttcaaatcctctgtgctattaatgtatcaccataggcaaaatcacataacctctctgagataagattccttactggttaaaagtggcaagtcatagaaacctcatagaattgtcttaaaagttacgtgaaataatgcttgcaaaaatgtttagtacagtgcctggtatatagctaagttcaataaatggtagctataaagaagtagagtttttagtattttcatttcagagactacagtccccttattatagatattttagttctttttagttatgtaatacctgaaggtaagaaattaccagcaggtggagctcagtatcagaaaaaacaaatttctgaaattgaggtattttatcaccttatgttttaaaaataaaattaaatgcatatagttttaaaatttacatgtgaaggccttcttttttaatcctacctaccaaaagttatcaccctgcaacttggtttttgaatatgtagaaggaatgcttttgttataattattttaaattgtttgctatatctggtgtcatacataaggtatgacagttcatttgcatgaataagacatttttaatgtgaacttaatttataaagattgtcttcaaatttggtcacttcatacaataaagtaattacactgataatcttaaatttaacttgtcaaaaccctcaaatctgccattcccacagtcttcttagggtattttcagtcaattgcttaagtccaaatcttgggaatcacccttgtgttcactttcttccaaatcctgttagcaagttgtcttgatattacctccaaaatatattccaaatctgacctcttgataacatttccattgtgatcatcctggtaaattcaccataaattaaggtctgaactacttcagccagtttacctgtttgttcccttgccctttgtaaattttattttctgtataataacttgagttatcgtaatgtataaatgagattttatatttctcctgcttatgaccctccattggtattcctatataaccagaatgaaattctaatcctcaccatgaactcaattacataatctcatccctgcctacttcccctcattatttcctaccagtcctcatccatcacactccagccattgaggtcttactgtcctttgggtacactaagtgtcttcttatctctgggactttatgtttcatctctttttaatacttattccccagatcttcgtatgaccaactgccttcttttgataatttcaggtcaaatgatacttctttgagagatctctgactacttcagctgtaataggccctatcagacccctgtcatcattatttatcctattgcctttttccttttcttgcaaagcacttactttagtatctttactatttctactattactacaattattactattttgttggttagaatttactctgtggtaggttagttctaaatatttccatgcattaaatactaatatatgtactttggtatgtatgaactcatttgattatggtatgtatgtatgtatgtgtgtatgtttttattatctgtcttctataatccctgcttgttccttaaactgtagctctcagaaggtaggcactttcattatgtttactactatttcctctgccttgtacagtgcttgctatgtaggggaggctaagtaaatattttttgaatattgaacaagctcttagaactcgtatcaacaagtagagttatcaaatatttatgtaaaataatctcctaggggatagggaacatatcagtggaagaaatcatacctgaccgattattcttagagtctttttttatgaaggtaatagggtatataaaataagctacttcgattttagaaaagacgttgacaatgttttttaccaaaggttactaaatgttaagtcactgctgaaatgggaaataggcttttagaatggcccaacaacaggtttaaaatcagaaatcaaacagtaggaatagatgtttatttgactagaaaagtataaagagagtgccccagcaattgatgatcacatctgttatggtttgaattatgtgcccccaaaagatatctttaagttgtaatactaaatacctgtgtatgtgacctactttggaaatagggtctgtagttgtaaactagttaatatgaagttgttagggtgagctctaatccagtgtgactggtgcccttataagaagagaagagaggctgacatacagggaagacagccatgagaagacagaggcagatattggaattatgctatcacaagcaaaggaatgcctggggctaccagaagctataggaagtaaggaagggttatcccctagaaattttggagggagcatggccttggctaacaccttgatttcagacttctggcctccagaactgtaggagagtaagtttctgttgttagaagtcacccgatttctggtactgtgttacagcagccctagggaattagtacaacatctgttgtgattattgtctttataaatgatctgaaagaggagggtcttcctagtgaggtatctagatgacattaaagtcttctagttgtgaagagcaaaaccagtgagtacagatgatgaacaaagaaacaccaaaattagcttctctctgtgctagaacaagtaacaaatccagcatcttaagattttatattctttgactgtaagcactgatttcaacacatttaatgttgaaaattgcttccagatttaatgttttatgattttatgagcctgggtaagtgcctggcacctaattaatgcttaatgaatatttaaaaaataaataagtgaaaccaatcagggaataaaatataggaaaatataattttattttaatgaaaatataaacttattctggtataaaattcaaattatggttacagttagggaaaaatgagtgcagggagtgaatactgggaaactatacgcattgtttactgaatatatcaacacttaagtagaaaaacaaaattaataaattgttaatgtatctttggagactcttttttggcaaaagaatacctttggtgaaatagagcagtgacttaatctaagaaacagtatagtagttaattgcatagtttctggaacaaagttgcatagtttctggatccacagtccttggatttgaatatgtggcatcagctattttttggctatataactttgggcaagttaaactttctgtacctcagttttctcatctgtaaactagggtttgtaacagaaactatttcatagggttaatgtggggagttaaatgagataatccatctaaaatgccgagaaaatgctttctcctaagaaattctttaccctatattgtcttttattgtttattaaatataaaattttataaaattattctcagtgtacaaaatgagatttattttgatggacgtgatataaagaatggttgttgcggacaataaaatttaaaaagtgagtatccaaaaaagaaaactagaggaaattatgcaaaaaggcaagaaaattaaaaaatttttttttgattgcatctaattataaagggagccaaagactttaaagaaggagatgtttatgtcagaattgtgacccagggaagttttacggagtaagacttttgactctcttgctcttttctatttttcttatttggtttcataaagtttcttgaactttggtcccttagaaagaatgttctgtacaatgcctgaatatgatacctggcatctagtagttgtatctttgtttaaaaaaatgaatgaataaagcagggatttataaagcaattaacaaatcattatagaataggttatcaaaagtggagccttactttccgattaaacatttatggttttgagtatcccactctacttcctctctagccctgacacttcattttgtgttaagtgtagtaggtttttgtggcaaggaaatttaaaatttttatttctgttgagaccttagagatcatttacacataatttatattcttttcctttgaatgaagaattataaagtattggagagttatacctcaataaaaaataaaaaaaattaaaacacattggattaagaaaagctttgtagcacagctatctgcaaggttttgtttcaagaagtgcttgaaagtgaggtatattctcagagaccttgagatccaaaacctaaaataagaagacttctatatgtttcttaggaataaaatcaggtattttatttatctaatttaaaaaatcaaaggccaggtgcagtaagctcacacctgtaatcccagcactttgggaggccgaggcgggcggatcacctgaggtcaggagttcgagactagcctggccaacatggtaaaaccccgtctctactaaaaatacaaaaaaatttagccaggcacggtggtgggcacctgtaatcccagctactcaggagactcaggcaggataatcacttgaacccgggaagcagaggttgcagagagtcaagagcatgccattgcactccagcctgggcgacaagagcgaaactctgtctcaaaaaaaaaaaaaaaaaaaaaatcaagtagaacagagatttatttcttagatagtgtttctttacttaatgtacaaggattttccgtttgttgctcgaaaacgcaacatttgttggctgtatctgttcctttaatccagaactgactagtatacttccatgccaacagggggagatagtatgaaataggagatccagatttgcacctctcttctatcttgcttttgcctcacacaggaaggtttgttggtaaattgacttccttgggcccactgtcactatctcttagctaaattttgagatggagcagaaaatgaaatgtcctcattgtaaggatcagctggagtctggtttcggctcccaatcctgtaaaacatgtgctttaatgttcagctctgagccttccacatcagaagtccacagagatcaggtaaggagaagttctgccacaggcctactttacccagggccccagacattatctaagagtccagcaggtcatctattttatgcggctgcttcaaatgggaaggataatttctcttgacttctgaatctggtggtaaacaaaattcttttgaacaatgctatcacttagatgctaaaccaaagccactgaaaaaaatgaaagtggcttcttttcacatttgtattttatttcatttgtttccttaattcacctctcagttttgagaaaaatatgtcctttccagtatttcaatacatggaaggtaaaagagagtgcagttttattgaatatttgaggagaaacatggctcagattttaaactgagccatgtttctcctcaaatattcaacaaagatgatattaagatttctatttttcaaatttcagtttctattctggctggtgagctcaatttagccttgttattttcaatgtctgtcaccaaaggaaactaataatgtttttcttgaacataggtatttaatagttggtgaccataactggtaaagcttttcattatgatatgtagctatatagttcaatgctaattttgtaatcaatgtttatggtttaatttaggaacttggaatacactaattccttactcttttaatgtataaaatataatttctgttactaataggaatatagccctattttaaatctgttgtgttggtgaagaattatatttatatgtcattttgcgacttaattgcctgcattctcttgagtcccttatttaatgcctctcttttttaggctttcttttttcagattcactatattaggaaaacctaattctggtcttcaaataagaattgtcaatgccaaaaaagtttatgtattttctttattttgaagatagttgaaatacatacacgattcttgctttaatattactacatccagtgtttgggttatggtgttccaaatatgtgtcttatattattggataagtactgtttgtaaatataatgaccattacttgtgtgcataagttttgcttatctggtttataaatttataaaaatattagaggatattgaatccattgggatcatcttctccaaattatcattttatatataataatgtctctgaagcctgaggtaattaatgactcacatagctagctagtgacttgcataacttaaatttttttaactttaaaaaagtctcgctttcttgttacccttcaatctctgatatatattcttttatgatccttctttaatatttttctttttttttatacacagtcattgtcttttcaaaacattttgtgctttttatttatttttgaaattgttcttaattctcttaaattttattaacttttttcttttatattagaatcttcaatctctgatatatattcttttattatccttctttaatatttttctatgtatttttttatacataccatcgttgtcttttcaaaacaattttgtgctttttatttgttatttttgaaatagttcttaatcctcttaaattttattaacttttttcttttatagtagttctactacatatcttcaaagtaaagtagaaaagattacagttttattatttttctcatttatgtaaattctgttcagagtaaatagaataagaatttttgctttgatggctatcacccaccatccttaggaaggcattacatgtaaggatgcacactgactcttgaaattttaaaacaattcaacaagtacatacttaattgaactctcataattatgaacttctacccatagccttgatgatttatcttggttattaactaatactgacctaagtataatgagacctcttgataaacctaaaaatatacttttaagtacttttcattgtcagtctgctcagtcagatgttaccacactcacttggagacatacatattcagtcacacatacctgaattgatcataggaagcctttgtattctcatggagtcactatttagcctctgtgttttatacagatgttcttgacatcttttgtttttatattctggtattatttatgatttttttttcagtgaattcttaccaccataaagtacatactgattcacgagagtatattttaggcagaagttgtccttttatcagaaactgacattcctctggagatgagactagtctagacatagttttctggtaagccatagcccctcaagctgcttttctgggtcatctgttccctccaagtagtgtgtcatattgatattgtattatgtgtggtagatccattctttattggaatttcacttccctctcctattataatacacttttccatcttgtaagaatttttaaatttggcctttgaaagctcattctggtaagcaaacttcctgttcaacagaagattgctcattctcccatatcccatgtaattcagcattgagaagtggctctttttttttttttttttttgagacggagtctcgctctgtcgcccaggccggactgcggactgcagtggcgcaatcttggctcactgcaagctccgcttcccgggttcacgccattgttctgcctcagcctcccgagtagctgggactacaggcgcccgccaccgcgcccggctaattttttgtatttttagtagagacggggttcaccttgttagccaggatggtcttgatctcctgacctcatgatccacctgcctcggcctcccaaagtgctgggattacaggcgtgagccatcgcgcccggcgagaagtggctcttaatgtgggctttattattcctttaccctcatgtgaaagtctttgtgttttcaaggcttgtgaagtttggttgtattgcattttatccctgctcattgtcgaaatctttggaacttctgttcattcctccttattcatcaatgcatgtgctctctggtttagtctctttttctacttttggtcattttgggatgacgttagcagtcacgtggaagacccacctaaaatttagtttctacatttattgatctaaaaatagtgttgactgagggatggtagctgataagcaaatttaagtcaagagactttttctaagaaagacagaagaaggctcttaggtcttcttgtttctgttgagtaactagcaccaactccggactgcttactttacttatgaatttcatttcatgagagacataaaaccttatttatctaggttaattttagacatatttctgccacagtagctgaaagcaaccctaactgaaagagtaggtaaaatgttgacaaaaatagataatatggcttagcacagtaccgctagtttgattgctgtagtttgttcgttccttttttagaaggtgcttgctcccaaatgcaggagcttcttgtggcactaagtttatgaaggtagaagaattctagtgcatcaattagatgttacggtggattttaaaatctggccatcacaccttgcttttgtaaatatctatattttgaaggcctggtacttaccctcctgccagctccatactttctgatggaattcttaggaagtttttactgctgccaattggcaatcatatcacaaaatattttaaagctatgtatatatttcagtttttggtgatgtgacaatagtatttatgaaaataaattcgtgagttcttgaaatgtattatagggctcaactttttaataagaataaaataaatattgtaaggaattgattttaatggctattaaatatattcagagaaaataaggtaattgtatttcacattgccctttctgattgtttagttttaggtactgctttggatactcagtttctaattaatttctagcaaaaggtttattctagctatgaacggtataatttttatatagcatctcccttgaaagcatatacatgcatatatatatgtatataaactgtttaatatatgtacatatacatatatataaagtctgtatacatataaactgtttttgctcttttcttaaagaagagggtgagagagaatgaggagcagagcagtagaaagtatggtcaaagttagaaaataaatcaaaaggataatgataggtgaatgctttaatctgtgtctaatattttagccacataagccttggagtctttatagtttactttttattatatttttctatggatttaaaaatgttttgtatactttattttgatgaataaatatatctgtagggatatgagaacattgaatatatgataaaaatttacccccagatatagactgtaaataaccctgaggggactgggaaagaggaaaagtatgaaatgggttttagcctttttactcaatcacagcgggtaagatgtttctatattcctaatgtcataaaggtatatatcctgcagtaattagtaaaaacagactgtttgttttgtttgtgatagtaaaaaagggttggctgccttaaagtctctctttgccaatcattttttttaattaaagaagcacacaaaaatagattcctctgttccagaatgtgttactgctaatccattgtaagtggtgccagaacaaagtataaatactttattagatgaagctacatcttgtaagtcaattcctatctcaccagatgttgctagctggaatctagacatctaaggtactgtttactagaatcacagaaatccttggttatatggtttatctgttgcattatttcacccaaagcaatgttggcttttcctttgcatttaagttaacagaaataaggtacatgatccttttaaggaattgggcttacaaagaaggaggtgattttttttttttaaaggaagtcattaaaaatgtctggctatcaagaaatgaataactctctagtgataggttttctgtgaatgaagggagtagtaacagaataagagggcctgttgattaaaaaatgttccagaaatatgaccttgtctccaagttaaaaatactttaaaatatcaggggaaaaacgtacaaaatacagatagaagtaattacaaagcagagtctcgtagccttgagtcatcaagagaaagtcaaaccatgtacattttgaactgtttgaaaagacacaaatacataatttggtttttgaagataatctttttaaagatatggctgaatgaggcatttcattagtgccttttagttccaaggtaagttattgttttaaaaattgtgaatttctaaagttttaagatatctaataattagctgtttgttttttgtacctttacaccctcaagataatttatggatactttgtttgaatctatgtatgattcttaagcagtgaagcaattgcagatattaacacattagtaccttttttgtctttcttttttgttttacattttttaacttaaaaaaatgttttgtagagacacagtcatgttttgttgcccaggctggtctcaaactcctggcttcaagcagtcttcctgaccaggcctcccaaagtaaaaggattacaggcataagcctccgtgcctggccctacccattaattctttcttatcccctcccctccccgcctcccctctcctctcccctcctttcccctcccctccccttctcctcctctccccttcttttttcctcccctccccctccccgtttcctccccccttccccttttcttaccctccccttctcctcccctcccttttccctcttctcctctccccctcttctcccctcccctcccctccccttcgtgccccttctcctcccctcccctccccttcctgccccttctcttcccctcctctgccctcccctcctcctctcccctccttttttccttccctctccttcctttttgagacagggtctcgctctgtctcccaggctggttgtgccatctgggttcactgcaacctctgtctcctgagttcaaatgattctcctgccttagctttctgagtagctgggagtacaggtgagcaacagtacactctactgatttttgtatttttagtagagacagggtttcaccatgttgcccagactgggctcgaactcctaacctcaagtgatccatctgccttggcctcccaaagtgttgagatcacacgcgtgagccaacgcccctggcccaactcattagttctatgaataattttgttgctcccctatcagtgtagggaaggaagaaaacgatttgacttaaattacattatagatttgattataagaattcttattctgagtaagaactttttattattatctttggaaaagttatttaaccactctaggctttggctttctaatctataaaatgaggataataacaggacctgctatatagtgttcatagaagattaaaatgggcgatggtgcttggcttatagttagtgctgctgtcagtgtttgagaccttttctaagcaggttagtattctcttttcaacagagacttcaaatggtatattgtgactattatcttttatgtagcccttaaaacttcagcaatagtgattgttactctgttttttccatgtatttttttttccgtgtattttacaataaaaaaaatttggtgtctcactgagctacactgagatttaataaacttatgtcactgaacgaaggatttctgaaatgtagatccaaactttcctgtgtttatatccaagggcctctcctcttagtgttttatctttaatgaaaaaagtttgtgatcattttatgtcattaatattgcatagttttcattcatgtctaaattctcttatcattccaggccaaaaatggctcttttcttgagatgtggtattaaaaatagtgcatgcctgaagtcaggagttcgagaccagcctggccaacatggtgaaaccccgtctctactaaaaatagaaaaattagctaggcatggtggcggggacctgtaatcccagctacttgggaggctgaagcaggagaaacgcttgaacctgggaggtggaggttgcagtgagccaagaatgcaccattgcactccaccctaggcgacaagaatgaaactccatctcggggaaaaaaaatagtgcataattcttaggtataaattaaccaagttttatatataatattgtccatttgaatgtggtaattgttcaaatataggaggtagaggccctccatccttccaatatcttaaattttgtgtgtgtgtgtgtgtgtgtttcattttttaaaattatacttggttatatcacttggttacattttttttttattatactttaagttctgggatacatgtgcagaatgtgcaggtttgtacataggtatacacatgccatggtggtttgctgcacccatcaacccatcatctacattaggtatttctcctaatgctatccctcacctagccccctaccccctgacaggccctggtgtgtaatattcctctccctgtgtccatgtgttctcattgttcaactcccacttatgagtgagaacatgcggtgtttggttttctgttcctgtgttagtttgctgagaatgatggtttcccgcttcatccatgttcctgcaaaagacatgaactcatctttttttatggcagcatagtattccatggtgtgcatgtgccacattttctttatccagcctatcactgatggacatttgggttggttccaagtctttgctattgtgaatagtgctgcagtaaacatacatttgcatgtgtctttatagtagaatgatttataatcctttgggtatatagccagtaatgggattgctgggtcaaatggtatttctagttctagatccttgaggaattgccacattgtcttccacaataggtgaactaatttacactcccaccaacagtggagaaacgtgttcctgtttctctacatcctctccagcatctgttgtttcctgactttttaatgattaccattctagctggcatgagattgtatctcattgtggttttgatttgcatttctctaatgaccagtgatgatgagcttttttttgtatgtttgttggctacataaatgtcttcttttgagaagtgcctgttcatatcctttgcccacttttttttttttttgatggggttgtttgtttttttcttgtaaatttgtttaagttccttgtagattctggatattagccctggggttgttcttttcttgtaaatttgtttaagttccttgtagattctggatattagccctttgtcagatggatagattgcaaaaattttctcccattttgtaggttgcctgttcactctgatgatactttcttttgctgtgcaaaagctccttagtttaattagatcccatttgtcaattttggcttttgttgccattgcttttggtgttttagtcatgaagtgtttgcccatgcctatgtcctgaatggtattgcctaggttttcttctagagtttttatgattttaggtcttacgtttaagtctttaatctatcttgagttaattttttaataaggtgtgaggaaggggtccagttttagttttctgcatatggctagccagttttcccaacactgtttattaaatagggaatcctttccccattgcttgtttttgttagatttgtcaaagattagatggttatagatgtgtggtgttatttctgaggcctctgttctgtttcattggtctatatatgtgttttggtaccagtaccatgctgttttggttactgtagctttgtagtataggttgaagtcaggtagcatgatgcttccagctttattctttttgcttaggattatcttggctgtataggctcatttttggttccatatgaaatttaaactagttttttttctaattctatgaagaaagtcaatggtaacttgatgcggatagcattgaagcactgaatctataaactactttgggcagtatgaacatttttacgatattgattcttcctacccatgagcatggaatttttttccatttgtttgtgtcctctctgatttccttgagcagtggtttgtagttctccttgaagaggtcctttgcatcccttgtaagttgtattcctagatattttattctctctgtagcagttttgaatgggagttcactcattatttggctgtttgtctattattggtgtataggaatgcttgtgatttttgtacactgattttgtatcctgagactgctgaagttctttatcagcttaaggagattttggctgagacgatggcgttttctaaaatttgacttcctctcttcctgtttgaataccctttatttctttctcttgcctgattgccctggcgagaactttcaatactgtgttgaataggagtggtgagacagggcatccttgtcttggttttgaatgaatgactgatgcccagcgtttgcttggctttctgtatgtaatctaggcaacctggcttactacaaagagagtaagcaaagagttactttgttatcttttctgtgccttagtgcaagtcatttcaccccctctgaccttcattttctcatgtattatgaagtgaaaaagctgaaatagaaaatctttaacacagaaggttccttctaccactgattgtttaagaccatttcattatatgacagcgttgtaaaaaatgtgatagaataaaaattatggcccagtaattttcacacttatttttaatgttaatctttttagtaatgccctatttacataaacgtatattgaccaacttatttttgtcttgggagttcgttgctttttaaaattctttctttgctgatatctaatcagcaactatattggactccaaaatatgggaagaaacttcaaaccacatgtgctaattactgtgaaaagagatgctagcgaagcaaataaaaagttagctagttttccagctactgcactgtaggtgtgtgaatagccagagggagattatccagtgaccttgctactgctgagctgtaaatgttgctgtacagtttcctggaattatcagggctttaggctcttgctgagaaaaaatatctttgggactacagctatatttctgacagtggattttggggcaaggtgtcgctttagttagagataatgttctaaaaactggatgggaaatgaaagattaacaaatgcatatatctacagaaggaacaggattggaaaaaaagaaaaaagcgtatatgcacatttttattgcatagaatctatgtgaatcatgcaattcttaacccattttcctgattaatatattacatataggggtgatttttcttttcttagacatttaaggtagctgctgcttataaggtaaatatgcagtgattctttctcagctatatattagttgtctaggacctccataaaaaattaccacaaatttggtggctgaaaacaacagaaatttcttctttcacagttcgggaggccagaagtccaaagtcaaggttttgccagggttgattccttcaggagtctctgaatgagaattgttccctgcctctatcctagcttcttgtggctgctggagatcctatcattccttggttcataaacacatcactctaatctgtctccttcttcacatcgccttctgtgtttcttcctcttctaagtctcttacgaggaaacttgtcattggatttagggtccctggataatcctgtttgatctcatgttgagacccttgacttaattaaatctgcaaaacttgcttttccaaataaggttacattcataggttcttagtggaaatatcttctgagtggggtgcggggaggtggtagtcaccatccaacccacctacagtttgtgtctatcttctgtttaattatcaagaaagttctcaaaaattaaaactttggttgtgggtgaaatctttaacttgagagaagctggttctttctgcccttttattcaagtaattttttgagtacttctctgtgagtcataatatttcgggactggaagatactataaaatatttttcttttgccagaagcacagatactttgtttatggtccaactctgagttagagtcaaagccaggcctagagcatagattctgaatcaagtgtttacgtctgtattatgagaccagaaagtcctctgtttattacattattggagcaattaaatatacatttattgagcagacttcaaatagcattactttttgaatggtttgggaaagagtccttgggaaatatgaggtctgtgtcttgcaagaactatttattcaaggcagtcaacatagcataatgattaatagcaaaaaatttgtattaaagctgaatttaaatttcggctgcttgaccacatgacgttcagcaaatcacttagtatttctagggctcacagtcctggctcacactatttggaaaatacctggggattcattgggagcaaagggattgaggggattttcaaattctcaatatttaaactttttattcaaggaaaatgattctgcttaatataaaaaatacaattttaataacagtggctattattttacctttaataattttgctaaacctttgatacagttatttggtgagtacccattcttaatttttagatgataattgtagtttggatgatgactcttaatcagatgtcttcatggttataagtctgatgtttggagttacacaatggctgctttaggccagtggtttattatgttgtttatttcatattgattctcctatgcttattgcctgttgacgtaatagttaatgaacttctgaaaatacccagtgtacaacaattctcatgggtactttattaattcaagcagactagagcctattacatagaaatagagacctggtcctaagatttctaacttacattcatattgataaaaattaagccctggaggtgttatttataatatttggtaattggtaatgttgggattaaataatacatttttatttctaggtatgtactaggcctttcttgaacttgttttattaagaagttaaatattctctgtattaacacttttagctatttataagtacagcaaactagttttcaaattaaaataattagaaaaatcaatctttttgaaaaatgcaaaggaaaatatcttttaactcccaagatagtattcctctgttgtttttgagaatttcctactatttaaatagggataactacagattcttaaaatcagtctgagttaaaaagattacctataattggaatgacttgggttaaatttgagtactttaatttcatttttttcttatgtgtcatttgaggtttcttagcacaaaacaatagttcaagtaaatatattcccttttatttactatttaaatgatgtctaatagctcctgtcttgcttaacttcatcattaatatgtagcatttattttaatattttaataatttgagttaagaaaccaataaatccccctgccttcttgtagcttagattgtattgtgagtgtgtgcttgggcctctagatatctggcttgtataacagaggtagtagtaccattcattgaaatgggaaactgataaaaggccagctttgggaattatgagttcagtaatatattgacttttatctacctcttgcgacatctaaatagaagtcacacggatgtttcaacattcaagtttggagctcagtgaaaaaagtttaagttgcagatttaaatttgtgagtagacttggttcaggtggtaattgaagttgagacataaaagagattacctagggagaaagtacagagtgagaaaagaagaaacctggaatcagtagagcctagaatcacattaccatttaatgacctggtagaggagggtgagcctgctgaagaaactgagaatgtgtagtctgagaggttggaggatagtgtggtaggggaataaatgtttcatgtaggcatacatggtcaatagagtggaattgtgttgagacgtcaagtaagagaagtggaaaatgtgtctgttagattggtgaaatggagtctgttggtttcctaagaccatctgctttggtgtagttatggggtgacagccaaataagagcagattgaggaatgagtgagagtagagaaaatggagacagtgagcatatataactcttttaggaatttttttttataaagggcaagcagtagctggaacagaatatgtggtgaagggagaggttcatccttctctttcttctgctctttccttcctttatttcctactctcttccctcctttttttccctatctctctctcacacacacacacacacacacacacacacacacacacacacacacgtaaaaactgaagggctgatgggaaagaaccatttgagaagggatggttgacagtacctcagagatccattaggttcttgtaaggtgtaaggttcttaggaggtcaggaagcaatgagatccaaagttaagtagagtggtaatcctaagatgggagttatctgcctcatgtttcaaaaaaaggaaggagattataataggtagagaattttatagctttgaaaaaacaaaatgaagaggttcctacctttgttaattctaaagaagctagaaggtatggaaaaaagttgttttagacatagaaaagtaagaagagtttgaaatggttgacaatgagagtggaaaataagaaatgagttggccagatatttagggcccatttgaagttagtaatcatgtgatactcggtaacagtgtttagttgcttgggtgtgaactcagagagagcagatagttggatccatccagggctgaattttgccacaagggagcacctaagagacagggtagcaagggaatttagaatattggcaagagtatcattgaaaatgatgtagcatggcatctaagttagataaagagagaagagaagagaagatgattgattgggagaaagtgggagactacaagacttaagagttccagtgagattgaaaaatggttacagcagaactggttgaaagcaaactgatgggataggagactgtggccagaaagaggggagcttgaatttagagctattccatgtgatgatagtgtccaagacaaagccatgactgatgtagagtggacaaaaatgtttccccttccacccctacagattgaaagctttgtgacagcaccttctgaggtgtattttgcagaatattttctctcccaaaagatgcaaatagtaatacattattaagactctgagacatattgcattaatgaatctgtttaaatttgtttaactgtgcatttctaaaatctgtgggactacagaagcttttgtactatgacatctattaatggccatttaaactagggtttttccatacttttgagcagttgttttatttgttatgtgctgaaactgttaaattaatgggaataagtgagaataattatcacaacatatgtgtttagtttataaagaatttaatctacattaatatatatcaatatcaaaagatttcttttcctattaaaattaaatgtttctaaaacctaaaaatgtaagttaatatattgttttgttagtgatcattgtgacatttgaagttgcttattgaaaatctttaattagtaattgatattccaggaaagcctactatattagttctatacaatagttacccaagttggattagttaaaacaaagaagagtttacccagtcatgtagctggatatacacagaagttcaaaccatgtcgtcaaggatttgttttcatttcgcagctctaccttctgttgtatggacttcattctcaggcaggatgtactgatgtcctacagtgtgacagtttctctcagagaggctgaggatgggacaagcacttagaatctgactgacttctttctaaaatgcatctcctggttggattttattagctgacaaaagaagtacaatattataaccaccatctttctttatttaaaaattttaatttttctatatttttattaaatcttaggattttcgtttaggttcttagtttctgattccattctaataaataaaatcttgactgaggacttgaaactccaaatgttcccagttactagttgcagtaacaaaaggagctctgataagagtattattgatgcatgtacagtacaagaatactaaacattaaaaccattcaggaactttttagataaagttggaaacttaaaacatttacagaaatgaaatatgtacttagtaatctttattgcgtccttgtgaggtcctctgcaacaaatacaaaacccataaaacttatcctctctatcccctgaaactcatcaataaaggaaaacaaaacaaaaccaaaccaaaccccacaaaataacacatcaaacttttgagacatttggcctttaacctgttaaattattttctgaggaatgtagcctttaactgtgtagtaattgactgtcatagaaaatggtagtcaaaatcaaatctgtagcttttgacaaattagtggtctttttgatggacattttagtgaataaccataaaagatgtttttatgttttcctgctttataaataaaggaaagtaaaatgatgactagtgttaaacaaattactggccttaatgaaaagcatatgaaatttatatccaggttggatatggaaagtcacaagagaccatcatttcttcctaacaaccaaaataagctacaaaatagtagtttttagaaacctcatcagacagctaaggacagaagtaaacctaaatgaacctacatccagaaagtgacaggccttttacaggaaaaaatagacccatgattactttcatcctcggtggaactgtatgagcagatcaatcctcaaaagtttttaagagatttgtagcatcaggtgtaggccgatgtgaaagattagaatctagaggagcctaacccacagagcgaagcactatctacccatctactcttactcaagtgttttcactgggtgaagcagtagatcagagaaggagacttgagagatacttcagatgaaatcctcaatacatcagaatggtggtatgtagggtgtgtttctgatgaggggtgtgggcgtggggaggagttcaggcagaaaaactgagtactctaggctttcacttacaaaagaatataagagccccttcccaaactgattctctgtagggaattctgggtcttcacattctagggcaatggcccttcaaagactaggctggggaatgggtattagagctgaaagttgtcttcttaggtacataaagtagtgggtgagagcaaagagacttctctctcccacccgagaggctgtaaagctgggagagatctcctgtatttcctaaagctggtggatcagctttgaagctgagggaggatgctagaatctcatcatggctcagctttatttctagatgaaggaaaactgatctctctcaaagtatttgaaggctgtggcaattgatttaaactaaaactgtagcaaaggctagaaccaacttattaactacagctccaactctccagcagcctgtcaaaaaaaggagtgggtatgtccatttcttgaggaaaatattcttgaattcagactctactgttcttttatacaaactgtctggcctacaatcaaagattatatgacacaccaaaaagtgagaaatttgacccataggcaagaaagtagacccagatcttggaattatgagatattcgttaatatagccgttacaaaaatgcttagggatgtaatactttcactctcattataaggtattccttgtctcacagtttattagtttaagtcaagtagaaaaatttactgttgtatcgttatgtccctaaattgtattaaaagcagaatcttagttaagataccttgataatctaatttataatagttatgatttttcatacaagcaaattacacagttgtttactgagcaaagtcaatcagctcttaagttgtatcagtgagatgctcatcaggaagctggttggtgtgcatcttgtagtactggataatttacaaaaaacgtattttggtgaaggatggatgaataggcagagcacagaggatctttaggacagtgttggctacatgttgttaaacatttgtccaaacccatagaatgtacagcaataagagcaaaccctaatgaaaactatggactcttgagtgataatgatctgtcaatgaaggttctcaactgtaacacaggcaacacgctggagggagatgttgataatggtggaggctgtgcatgtgtgggggcagaggacatatgagaaaatccattccttcctcctgcttatgctatgaacctaagactgttctaaaaagtagtctttaaaaaaatatgtttagccattttggtcacacatttgggaaaagcaccatggaacgtgaactggctattgaataggacgggagctaattatagccttcttcttgggtcttatttccctagagacatcttatttaagagatacagaataaagaaagcaaaaagaatgatttatgacattttacaacctggatctcaccgaactctattctgttttactctaggtttccttagcattgttgttttaaaacaagatcttaataatcattcagatgtttgttttgtgcatttggtttctaatttcattatttcagaaaatgaatatgcttgatttagcaagggggttttctttcttttaataaatattcttaatatgcaagcatcaaagagaaaagacagcatgacaaactgagttactagagagtgaatacttctaaaatgatttgcctttagtcagaaaccctgttgctaaaacaaatcatttagaaactgttttaatactgaaattctgtatcctgatgggaatagaagctatctatctttcattgtgcccagcaaatcagcattttcaaaaccttaggttacttacttataaatgcatttttttaaaatgaaggacatactgatatttacagtatttcatttacattatgagctgtaatgtagaattttttcagaaggtagtcttctctggggttataatttccctgtagttatttctcacaaaatccctctgaattttatgcctgctttgcataagaagcccctaagatatttggcactcagcctggagtttgagcatgaatattatatttttcttgattcttattgcctcctgattttaataagtagctggctgttcctacagagccaaataatcactttcattgttctgtccaagaatgttattagattgggtttatttacataagtctgtgagaaataatattcagtttttgttttaaagacccgttattaacaacaacagtaaaggtcttcctttcacgatagttcagccttctcattggttcatattcaaagggtacctcaggcgaactgtgactaactgctccaaggaaagtactcattgccagcctggtaccatgaaactcttctctggggttttcattaatgatcagcgtaacgcaaatgatggggagttggacaaaagtcacagaatttttgagatgaaaattttatctagccagtgcctttcttttttctgatgtggaaactgagagccagggtagttgagtaatttgctcagactcatactctttatcccttctgacttcaagaaccttattcctttgccttagtgcctcctttcagaacctcactttgagaactgttatatgctttttggttgtcactttctacagcagccagataggcagtcattggttagagcttttgatctttgtcagagccactccaatcagcagaaccttaattcttgccctttatatctttgtgctttagtgcgcagggaatgggggcactaaatggaatattgcagtgaaagagcctttttcactgcaattttctaatgaaggataatttcaaaacttgataggtatgattttactttaagtaatttaggtatttttttaatagagtttttctgtttgtttgtttttattttttgtttgttttgagacagggtcttgctctgttgcccaggctggagtacagtggtacagtctggcctcactgcaacctcaacctcttgggctcaagccatcctctcacctcagcctcctgagcagctgggactagaggcacacgctaccatgtctggctaatttttaaaaactttgtagagatggggtctcactgtgttgccgaggctggtatcaaactcctgggttcgagcaatactccccacttggtcacccaaagtgctggaattacaggcatgaaccaccaagcctggcatagagttctttttaactgataatagataaacttgtaattattatgaaccagtctcttagttttatgtgtatgtgtacacacacacacacacacacacacacacacacaaacacacacactgtctcatttaattttaaaataatgaaaaactattcttaaatgagatgcgaaactgatactgtacctagaacttttctttcaagccaaggtaatagttgtacttacagcactttttctgagcatctcatcagaatattattttacaatttcaggtattatttaataacattgcttctcccttcaccccttcattagtcccctactacctccattgtgaggggccatccttttgccagaactaattcctacacctcctttatctggaaaatgtatcttgccattacttgaggtgagtaaaatgagagtatcaccaccagccctgccaggcctaaaagcaaacttaggcattgtattcatggcagttgaagggaagttttttaattttaatttttaaaagtagccatttgattgtttgatgtaaaaatcaacctgtcaatgaattcagcacagtctgatgtgttattaggtagactgtaatttaaagctgatactagatgttacatagacaggaactacatgacaaatgagtttcatgttttatttgtagaaatctgggcaccaaatgatctggcactggttggcatgttttattaaccctatttgcattttgattgctgctatatgaaacttaaggtctcattattatttttgataatatgtttttaggccaacctatctataaagaaccttcatatgaaaagatgttttcactaattgtatcctgtctaacacacaatatgttatgctttgtaacttaatataagggagcaatttttaaagttttctttatcccctaactggacctctccattagataattctaatccattgggtaattttagtattacgcacttagaaaatgttttgttttgatattaccaaagggttttgggagaaagcatgtggccaagaatatgtacatttactgttacagagatataccctaggtattggagacaaaagaaacaaaagatgttatttgtgacctacttacttgttttccagaagtaaaatttggcatcactaatgctggaagacatacggaattagtgtgcttgacaaaaggatctcttgttcttttgtctgctgctgattagcagttgaaatgtagtcgtcattggaaaattgaccaatacttccattacaaaaccacacgtgctttgctcttggtgcccttcttatgtcctagttttggttttttttcctttttccctctttttttctgccctcttacctaccccattcacttatgtttataaaatggatctaaagatttgaaattttaggaaaagtttccttcattatggtatatgatattcagaaatacacattgtgtggcaaatagcaatctggatttggtaggattggtggtaggtatgtctgccattaccttcttattttacttcatcctcctcccacccgcctttctcctccttatcatcaggatcattatgatggtcatcatcatcatgtgaatctttgggaaacttcctaggtactgaagtgaaattcacctttaaaaaatgtgttccatatacttttattcctgtttttttttgtgattattttttcttatttgaattccctcccaactatagtcctatccgaaatagtctgttaaataggttccttatagcttgtgttcttttttgcatgtgttaatacttggttttctgtgaatttcctttgcatttcttgttttcatctgtatgaattctatatgaattgctatatgaatttctatttctttcttattgtttcccccaaatcaaaacatttgttgaggggtcagtaaagtaaaatgctatagagtttatgtgtatttggttatttgttatcttgaatgtcaggaagtttatattttatttagttggaagacatgatggataagctgtggataagtacctaaatacataaatgtctatacatattggatagtttactgttgctgaaggcttgtttcttaatccctccaggaaagaaaggagaggctatccaaatttgaatctattcgtcattcaattgctggaataattaggtctccaaaatctgcactgggctcttcagcagtaagtaggattaactctctgtgctactgaaaatggtcattgtctagcttctttctgatgcactaatgaatatatatatatgtgtgtgtgtgtgtatatatatgtatatacatatataaatttgcacttacaaatggaaagataagtgcataatttaactttttgtgtgcatatgaatctgtctatatatgtgtatagtaaaatcccatgtaacattgacatagggaagacagaaataaacttgaattataggcttcctttacaatatacaaataattatgagaaacattttatgtactttgattcttactggaataatagtgtaaacaattcttttctagtgaaacataacctttttacagtagggattactatatatattttaaaaatgtatttatgtgtatatttatattttaaagaacattttgattataaaattgaagtctgtttgatagattaatcattgaaatgtgggtttggcatatcacagtagtgctagagtattagttgtctttagtaacagcagtttggccatctcatacacatgaacaaacacacagaagagtttctctaaagcattagttctatttacttggagaaggagttttttttccccctcaaacacacaggcactccagtgtatacacccctaacaagtactagtctaattctggtcctgatggatttacctacactggatatttcacataaataaaatcatacaatatgtgaccttttgcatgtagtttcttccatttataattcttccaaggttcatccatgtcatacaatgtgacagtacttcattcctttttgtgactgaataatactccattgtatatatttaccacatattgtctatctattcaccagctgatggacatttggttgtttcagcttgttggctattataaataatgctgctatgaacgttcgttttcaagtgtttttctgtgtatatgttttcagttctcttgggtgtgtacccaggagtagaatttctgggttatatggtaataattctctatttaagcttttgaggaactgccaaactgtttttcatggtaattataccattttacattcccattagcaatatatgaatattttgatttctccacattcttgccaacaattgttattttaaatgttttcatgttacaggcattctagtgggcgtgaagtagtatcttactgtagttttaatttccattttcctaatgactaatgatgttgagcattttttcatgttcttattggcagcttatatgtgttctttggagatgtgtttattaatattctttgcacattttaaaattgcttatttattgttgagttgtaagagtatatattctgaaaacaaactccttatacatataatctacaaatgttttttctcacccttcggattttttttcactttcttgttaatgtcctttaacacacctaagttttttattttgatgaagagcaatttattttttccttgactgtgtgtgcttttggttgtcaaaaaaaaatcgtctaatccaagattatgctgataattcatctttgtttgttttcttcttagagttttattcttccacttatatctttgtttattattggttaatttttgtatatggagtgaggtacaggttcaaatttttatttatttatttatttaatttatttatttttgagatgaggtttcaatctattacccaggctggtgttgagttcctgagctcaagtgatcctccctcctcggccccgctaagagttcaaattcattcttttgcatatggaagcatatttaacttaaaatctttaaaatgcaacaactatgaatcactgtttatgcaaataaacatacaaaaattagaatgttaaagcataattttagataaagtaaagcaaatgcattatatataggaaaatgaaattagaattaatcgcaatggtatttttactggacgtgacataacgatttacctctgtttttaacagtatctttaaaatgtagagctccctttaaagacagtctaatggaacgcttagatcaacagtcttgatagaagaaagaacttaagactttggctgatagcagaatttgttttcatctgaatattgtatttgatgtcatcagatgtttaatattttttgttatgatcagaataatattttaatatgttatatcagctacaagcatgtgctttcctttccagtgtaccaaaggggttaaaatccctattattagtatctcagattactgaggctacagttacatctagcatcttcctatcttaaggaggttataattttgcattgagaactatttttcagagactgcttctgaagccaaggcctagagatgttagacagtattaattacatattttaaaagcctactggcaatcatgagggtccattccaattgaaagtctttcaaaccatattatatttaatgagatctgttccagtcatgtcaagaatattgccctttttctagggccatctatctactgcagaatttctataatgagtggctgagcaaatcgcttgttccatcttacagccactcatgaatactagttgtatcactgatatatggagtgaataatgcccgtctgatagtagcagtctttgaaaaatattctttaaaacaaaaataaagcacattttggtccaaatggtttgttctttatatagataacagaagaattattaaattattcaacagcagtctccttaaaattcatattttctacactctgttgacatgggtgctatttcaattttagaattactttgtactagaatttagaaaatcaaaatattagaaaataaaaattgcttccttcatatagaataatattgtaagtaagatttgcttgcttgcttgctttttagaaacatcattcagttatgttaagttgtacatcagttgtaatatagtgttataatgcttggcttccaccagtggcataggggaatgtagctattttcatgcatgatgtgaactgcttgtattttttagtgttctcctttgagtctagaaaagcggccttgtactttctttaatcaaggcacgttgtcaagttcaggttaaatagtatacattttaaatatatcagttgtcttctgttattcttaaggtcttaagttgcgctttccccccatttattaatatgtaaaagagtgataaacaagggaaaataaagattttttgcattatatcactctcatacactaaattctgtcatgtttaggaaaattaagttttgaatcacttgcagtattacatgtaatttttcttaaaggacttattgagattgatattccataatttgtactgtaatggaacaaatctattgtttatatgtttgctgaaatgcttaaaacagatgacagagatcatgtcagactgatactaagtttatacaggcaatcccaacttgatgataaatgtttacatttactgaaatatggttgcgtattgacatattgcaatgatctggtagtagttttagttgcaatgtgtgataagattttagcattgaatatagttaattgatgaaaatgtgttcttactgatattgtggcacattttatatgtaaaatatatgggtttaaggaaagaatatttgatactgaataaaatgaaactatagcaaaaatgtgttaaaatgatgagagaggatgagtgagagtcacaggcacaatcgtaaaagtaactgggtaaaaataataaagagagaaaagcatgttattaccaataaatgatgagtaagggaacaaaagaagccggcaaaaaagaagtcggaggaaaccccaaaggtactgaaggaagcagaattgttagaaagaaagaaaggtaaaataaaatacatattttgctaaagatagtgtcccttatcagagacccaagaaggggtacaaaaaggccaggaaatgggaagctgtggaggtaacctgatacttgagtttggcttagttgtctatttttgtttaatacaagttttagaaagaattgtgtactaatgcttatctctgattaacatgtaattctttatagttactatcctagagaacagttttattgttagctaaaaaccaaacaaattcaaattctcaaatattgtagtacaaaaaattgttaagaaatttatgaataaaaattttacagctagtttcattatagaatgtaaatattaggtgaagtatttttttttggttaatgataccagtgcatgaaaaaactgccaattcagctttactgctaaaaaatcagaatttgtagaattaaagatagtcatttagtgccaaagacagaaccactattttaactaatttacatcctgtttgtctatcctgaacacaaatgatcctgaggtacaaatattcggaatatcttatttttcattattttaagattaattcaatagattcaaacggtaactatttagaaatttttaaaaaactggaagggagaacattattttttgttttcattttatattaaacatttagtatatctgtacaaataaaaaaattatgttcaactatcaaactagaaatggcataaaatacactttcctacctatgattacatttccctttcactgcaaataatttttactaccaccaggcacattcggtagactagtgtttcccatcttttgtaaacagttgatttctcatcccctcccaaaattcctaagtaatacatagctttaaaataaaaggggtcctatggaattaaaaaaaaaataaatttatagggccaggcatggtggctcacacctgtaatctcagcactttgggaggctcgggcaggcggatcatgaggtcaggactttgagaccacactggccaacatggtgaaaccctgtctccactaaaagtacaaaaaattaaccaggtggggtggtgcgcaatcccagctactcgggaggctgaggcaggagaatcacttggacccaggaggcagaggttgcagtgagcggagatgacgccattggactccagcctgggtgacagagcaagactccatctcaaaaaaataaaaataaaaataaatttctagagatagggcctcactatgttgtccaggctggtcttgaactcctgacttaagcagtcctcccaccttggcctcccaaagtgctgttacaggatacagccactgtgcccggccaaatcttaatctagtgccttagaccacttagccatgctaccagttgagtcttaacggaatttttgagaaatgtttaaaatcttatgaattactctttgtcaccctagtgtattactaaactagatttggaataacttattaattagactattaaattaatgttaataactaaatttacatgagaatagaaaagataattaaatgtcattttcatgttaaaaattcagaatttaaaaaagtttgtgttgaagttttatttaggttgttcaagctcagtaagggttttacttgtatatttttgatgctgttttattcttgttttgcttttttcaaaatggtttattgtgtaattaattttaatagaatctagaccagatatttttaaaaaacatttttgtttttgcctcccaaaaagaagctcatcttgctactcaaatgcttgagtaaaggtatacaaatcttcattacatacttgagaattagcctggaccagggtaaggagaaaaaaataatctctttttctttccccaagaaaaaaatattttcaagtgctgcctccttattgccttttcatataaaataatctctttaatttcactaattccagcatatttttgctggactattctttaggaacaagatctagggaaaataactaataagacagctaacccaatcaatcaggaaaacttattaaatataacttattaactgtactgtattaactgaaacttttaaaaaggaggctttgctcctacccccatatctttggcaaaaatctcagataacttaccaacaaagaaaaaccctgtctattgaggctgagaaagatgggatatttgaggtagaaagcttcctttcatttgtgatgtcattatggtgggctcttgggatgttacattttttttgctgatgcatcctacatatattactgtcaagtttgtaaaattgtttgggatttcattgaaatcatattgataaaaatattccttccagtgcttctagagaagtctttgaaagacctgatatacccaggcaggggatatgtgtgacttttccctgtgtatgtgtgtatatacatgtgtatatacacacatacactgacagtaagttcagcttatatttcataacagtgttgtataggggatggggaataacagatctttgagcttcccttcctacctacaaaggaactaagaagcctatagaattgaagtgtgatctttatgagatagcaatataagttccttactatttagttttttaaaaacaaaactcagatactttccccagatgactttttcccccatacatattcttcgtcatatgtttaaataaatttcttggaatgctggctgagcttttgtacttttttccaccttaattagttcatcgaactctgttcatcattctctcagttggaaataaatgcaaatttggaaggatagattggctaggacaagaaatcaacaggtagcatccttgtttgggatgctttcctgttacgttgaccttttagagagacaatgataaaaagtcctttgtaaagatgttacattgaatttcttgtattcagtaataactgttgaataaataagcagttttgctattggtgagacagaaatatttctattatagtaaaaattttagaatttactctaattagatgcactatcataaaattttaaaataaaatttttgattataaaaatagaaaacatttgattatttttacttctttaataattgtaaattattagtatcagtatatacaaaaagttaattttgtgtagattatgcgtttgtttttaaaagcaatattcttttacctcatagtcgtgggtgggtctttagataaaattgctctttaaaacaatttttgggaatacattaaaccattttttgaaataaaatatatatgttaaatatgatacaatattatttgtcatagtttgcatgaaaattaaaagacttagtttaccaaaacttccatatatagtcacaaacggaatatattttaaaagtttaaaatgttatttaatacaagtggaagaagtaagaatcagaatgtagactttccttgaggtctgtttgggacttttcaagttttttattgttgttttgttttgttcttttaaccaacagaatgagtttggataacatgaaatagaactttgagcagtaagttttgggtctcctcagtggtacgaaacaataaaggctatgttaaaaaccagtttttacttactacaaaattaccatactttggccctacctagaatttatatcagcctataaaacttcatatatgaatatttgcctttcgtttattattaattctgatttttccaatttataaattactttctcatgaggcattgtgcatattgtattttgagaaccttaaaagttagttcagattactgtaccttaaccgcaaagtactctctctatctggagcagtttagttcctgtgtgccataaaaacaacaacaacaacatcaacaagattcttacttgtaatcagaaaatgtgtgatttaatctactatcagcacatttcaaggaaatacaatcatctcttaaattatctctgacttggtgttagcatttggcctcttaaaataacagagaatttgctttctctaccatgctcatggtttataaccactccttatctttgccatgtgtttgtaattgcatgttggtggttttcagtgatgctatttctcctagggctttatctaccattgctttgtagaagcagggccagccatgtggcagaggtaatggttaaggaagtcaggtgagtgaagataaagacagaaaggcacagcagcaaggcagcatcaaataaaacctgagatagtactcctggaatgtatgacactgctcagaacctctgtgatcaagagttaattacataaaaaagaaataactcaacttttcatttacataaaaattaagttattttgtgatacatttctgttaattccctccttttcttcataatttctctggttgataattttagtatatagatttattttaggacatggtgaataagattatcagtgctaactctaaatgctaatattgtgtctacctttgtatgatagataaaacaaagtgttgaagcatatgtatttgtggtaaacttcagcaccagtacttcaaaagatattttaggtttattgtataacttttaattggtcaattaaagggaggaacatttgtaagaagcctttatagttgctatgaattttattagaaaataatcagtattttctctaatttagttttttttttttaatatttgtttaagctttctgatatgatctccatcagtgagaagcctttggcagaacaggactggtaccatggtgcaattcccagaatagaagctcaagaactgttaaaaaaacaaggagactttttggtgcgagagagtcatgggaaacctggtgaatatgtcctttctgtatattctgatggacagaggagacattttatcatacaatatgttgatgtacgtttccagtttagttcatatgtatattttgatgtagttcattgcggtacaattatattaaaataacgaatggtttgtgataaatgcctgcaacacttgaaatttagcacttaatttttttctgaatttcttaaatacagtgcttcaaaatgtactaacatttaaatatgtttaaggaaacatgtatttagtaatattttaaattaaaaataatgtttataaaatcaaagtatatagctatttaaaatatgttgttaaatttgaacattaaagatattttgaattaaaactaaaaacaatgtgattattataaatttttttctagagaaacttaagtttatgaaacttatacttttgaaattggagcttggaattgttttcagaatggtgccatgaaagatttttaagaaatattttattcaatagtaataataaaatttcttaatgaatgggatgatggttgaattggtttttatagataagctcttgtttattggcattaataatgaatagaaattaatgaagaattaaaaatctatttacattgattattctaatgctaatttattttttgaaatttatttaagtattgctaaactactttctatgtttgttacatttctttattgagccttaaacagatgaagagtaatttcaaaatttagctttacccactaaggaattttaatgtttttggcatatgaaagaattgatgcctctgtttgttttccattcccatcatttcaaatggcctgcattttcaagattgctatccacaggatttcattttatgttgagagactagggtgatactaattgccttacagaaattgaaccatgatcattagatgaacttgagggcttagataacttagtaacaggtgtatgtacacagacatgcacatgtgcacatacatctcttaataagtttatatatatataaaacgtatctttgagctgacattcacataccatacaattaatcattttaaaatgtaggattcagtggcatttagtacatttacatctcgtagttatagctaaatgaaagtagataccattcaaataggttaaaaggaatatatccattaaagtatttccactatcataatgttcacactattcgttaatttttcgtagtattcagacctcaacttgataatcatatttgcccacattcatacatctaacctactgttttggaaactatgttgtttctaataatgtgtcattttttatttccttggcaaactcttttgtaatttgtatatgcctttaagttatgaatttagataacctaccctattacaatttgcgaccatattgccaatatttattacgtggtatgagaattgtagaaggaaagattgtaggtaaagtataaactcgttaaccacaacttgtatgaatgtttcattttattttctaagctctaaaagtaactatttttgaaatatgtattatgtaaacctgaaatatttgtcttattatcacttctagtttaaattgtaactataagtatttaaattagcgttcttagaaacaaaaaggaaagggtcagtgtgcaaatttttgcttgtttttaatattgccattttaagtggctaaaatgagcaatataatatatgctaaaaataagaggttacgagttcacatttgatagttttatctggtttccttctgtcactgaaatttttcaaatatctctgttaaagatgagaacatttatttttcactaaatgcctcaggttttctgctgcctaattttattctagtgagtttttgctgtatagtgttgagctcctgaagcagttgtaaacagtttaagatgatatagacagttttaattctttttcattttgtgcaggtgaatcttccatgagctaaaattatcctattaattgcctcatatacctgttgactagaaggggtcaataaatggggaaattcattaacagatatttaatgagtgcctactgtattctaatgaaggagtttatattatacgagctgtaagtaaatgagtcaacaagtgttccaatagaagaggttataaagtaatacaagattttagaggagttaaaaatattaaatagttgatcaataaaaagagcactgaatttggagttagaacacttggctttcagtcctagctctgtctttacttgttctgtggtttaggaaataaagggggttaatatcttaaagagtttttgcgagaatcaaatcagtgaatacatactttgcaggacgtgaaattaaataaaccaataaggcagcatagaaatgaatactggaaagctcatgtactcatgcattcatgcattcaagacattgaatacaacatttaatacaaagtataaatagacatttctccaaaaagttgtacaaatggccagtaggtattatgaaaaaatgctcagtatcactgatcatcagagaagtacaaatcaaaaccacaataaaacatcattttatcccagtagaatggctattattaaaaacacaaaaaaataataaatgcaggcaaggatgtggagaaaagggaactcttacacactgttgatgggaatgtaaattagtaaattcattatggaaatcagtatggagatttctcaaaaagctatgatagaactgccatatgatctagcaatcccactactgggtatttatccaaaggaaaataaatcagtataccaaagggatacctgtactcccatgcttattgcagtactattcacagtagcaaagataaggaatcaatctgtgtccattaacatttattatttgtctggtgatttgacaattgaatgtgtgccagtacatgtaccatatactgggtaaagtggtttgcatgttaatagttattcaactcttttactctgtgaggaggtacaaatattatctctgtttcactaaggaataagctgagacactgagagatctttctcagtgttttgcacacctagaaacatatattattagaaataggttagtaccttcagtgtgaaatattcttaaggatcagtgctaatatatcataggaggtctgcctactatgtacaaaagttctttaggcagtgaattaacaactgctttgaactgattcaaacactaactgcccttgagttgatttattctccatagttaagtgttaaagtaaactaatgcgtgtttgttcattactcaatgaaacaaatattcatttaaaaagttttatataaattaaattttgatacattcaatcttttttattttatagtatggaaaaagagctttgagtttttaaactttcagctgggaaagtaatcttccagtaatgcaagtaatgtcagaatttagtcagtttcgaaagttcttatttcttcacagcattttcttaaaatgggggtactcccatatctgtatttgtatatatcttcctgggtatgagaactagcagttggaagcttttgttacattgcattgcaatgcttcttgctttgaaaaatatggccaatagggtatttttgatttgccaggtttattgctatcaatttatccatatgacaacctactcataggccaatttgaaatatgaaaacaagagaaaagcggtcttggaggagtttgaggaaaattgcaccttacctggtgatatgcaattaaaaaatgctaagatttgagcgtgttgatatctacagttttgtcactgttgcattttatttctttatccaagatgtgtgaatgagtgtttttggtaattaataataaatgaatactccactacagaaagcaaactaatactgtatcagcagatagaaaataaatgatcagatgtattaaaatatttaccatcagattggatatctttccttatatttttgacatttttgatattgaaagttttatcaaatggaacacatatgtagacatatgtaaacatgtatcttgtccagtaactcaggtgtatcccatgctttgtttcctttggttagcattttagcaaaatgcatttcaggtctgtttgttagattttttatttttcaacaatttgaattagatttaaacattgtgaaaattgatttatctgtcacaaggtagaattttaaaacatgtcagagttttatttatctatttatatttttatcatcttaaccatttttaagggtatagttcagtagtgttaagtatattcacattgttgtgcaattatagtttttttaagaaaggaatctaatttatcaatgaatgtagattttctaaagcaatgtcttcacatttattctaccttattgttctctctccagaacatgtatcgattcgagggcactgggttttcaaacattcctcaacttatagatcatcactatacaacaaaacaggtcatcactaagaaatcaggtgtagttctgctgaatcctattcctaaggtaggtgcttatatacttttttgtctgtttgttttaaaagaatttttggtgagttaacatttccaacagtaaataaaattcttaggttatatgctagtagttcagaaaaaaagttttgtttttgtttttctagcttttattactaatgcaattgaaacatgaaacttccttgattttattaagatgagctgctttcttattcagtatttgctagtatacagatggcttggttttttttcccctttcctagtttttcttcagacttgaggcttttcttcactttataaggttcatactttgaaaggttcaggttataacagattctaagttgtataagtcaaagaaaatgtctagcagttaggaataaattagggttttaatttgggatgttacatttacaatgtattataagatattggaactattaaaaattagtctactcttcacagaagcagtaaatcagaaacttatctatgtggagcaaggtggttggataagagattgtcttaggtcatttttacctctatgatctatcacagaaaacactacttacatgtgctttacaagatttgttcaataaagtatgggtatgtggaagttttgtgttttaaaggtaaaatctttgggacttaaactgaagtggaataatggaactggcttagtttctgatcacttttgatgtttcaggagttgggttggtattggcaagagctctttcctttcaggactgtctaatatgaagaacagcgtagaaataggaaagccacacaacttggtagattaatatttgttgatatgacttttatacatttagggattgcttttaatttgaagtaagtgccagttccaagaatgctggtacctagtctggatttagtgatttggaaatttaaaaaacaagtattttatttccttttgttaatctgggatataatatctatatttgtacttttattgtactactgagtcttcactgagagggtgacctttaatatttctctcacagaagattttaacagttgtttgttaaacattctaattctctggttaaggaactggctttcttgaacagttttctataattatgaaattggctcattctttgttaaatttttttattcattttctacccttaattaccaaaaccataaaaaattcttcttcagcctgaaataggttgtcacattttttctatagcaaaatatatatatatataaatctttcaatatttcctccttcatctgtaaatgaatgctgttatagaattctaagatattttctctttagtcaaagcaatctattctcatggctttatttactatttatatatcaacaatttgcaaatttatatttataactcagatttctattttccaaaactgaaattgttcaaatttccacctcaaactgtgcttatcacctttaacttcaaaatttgttgtttctttttaaacaagtgatgccaccaaatacccagcttctcaagtcataaattgaggggtcttctttgacatctctttcttttacatcactgccctccctctaacactctaggttacaattaagtatatatctcttaaaaatacaaaagttagctgggggtagtggcacatgcctgtagtcccagctacttggggggctgagatgggaggattgcttgagcccgggaggttgagactgtagtgagctgtgattgtaccactgcactccagcctaggcagcagagtgagaccctgtctctaaataaagtgttttgtatgcttaattattcatgtggaagtatgaacatcaattccagtatatatcagtatgaataaaattcagtgcaggaagatattttttatccagattaggttaacaaaatatacaaataggatttcagagatactgatgtcccatttcacaagtcaaccaaatgtttgcattgtctacaggcttagccaggtctaaattgggagaccaaatctataaaagaaagaaataacaacgcaggtatgagtttgactaggaatacaaaatttcaaataaagctataccccttataatataaaatttgctataaaactttgataatagattagattctctggactattacatggttaattattgtttttccaacccccaacactttggaattgattatctcaccatctgatagaactagctatgaaaataaatatatactggatgctgtagaaattaaatcgttatatgtgattttttatatgaggtagaaatttaaagtttatctgggtattaacctaatctaaagtactggtatttgaaatatgcaaatcattatctcagtttgttgcaaatattatacactgatttaaaggttcatgttgctcttttaaaagaaaatcacaaagcagaagctttgagttagataattttcaactatgagtacataacaaattgatatggatttgttatggtggtagtatctgttacttatcttcctttgaattatttgtactcttataactgaatctatttcttgatttaatttgtgtgaaaagtaaatgtctttgattatataatgtgctgtaaaatatttaatttctgtcttgctagacttcatttttagcctaaagaattccactttagttcattgtaatttctatttcccatttatttctcttcccatttatctctgctcctacccataaaaatatgtttatcatcataatgcctaacttgaggacagaatggccaaagtaatctcttccttaccttcacatttttatgcacattcactcagaggtaccgaaaactagacaggattaaattgtttaactttctcactttatgaaaactagtgggtgcctgagccacccatccctctccctgatttttcctgcactgccttcagagcttgtgtaaacatatggaagatggaagaaatttttgtaaagaggggttattaatcacccgttatcatcattcttacattagcaaacaagttggacatgtatatgacctgttctttacttaattcagtttctactcaaatgtcacttcatcagggaggccttgtctgactaccatgtataaaataacacatcaagcccttttgctcccccttcttctgcctttatttctctttgtcatgctaacatttaagtgacattatattatatgatgtatttttaatcatttgtctctcccaagtaaaataacttcaatagggtcacagttgtatttaacaattagtgtagtgtatttccagtgtctcgaagagtgctgacccagggtaacattcaataaatatttgttagaggattgaattcactgagcaatggctaggagcccaggtaattgctgacctttttatacacattatctcatttaacctcacatattcctataaaatattaataagaattgttgttaatctcatataatattattgttgctgttattgctataaaatattatgaatgaagagctaaagattaaaatggtaaatgaattccccaagaaaacagaactggttaagaggcagatctggagtttgagcccacattcttaaccactatatatttttccagattgtagagtctaagttttagaggctaaaataaactgtttaattaatatgaatgtgagtttaaggaagaggaaatctctttcattctataaaatattaacttgaacaagattttaatatatcaaaaactatttgtttctataaaagaaaaattactgaacagcaatattgggtagggaaagctaggatttgagctaaaatatagggattggtcaaatatatttaagaaagacatctagtttaacatttaaatgacacttttggaagatatttgctttgttaagtttaatatttcttcatatttagatgtttttaagtaagaaatcgctttctgaatcgaaggtaaagcaaaaacatttatgattaaatgtagattaggccaagtgcagtggctcgtgcctgtaatcccaggactttgggaggctgaggtgggcggattgcttgaggtaaggagttcaagaccagcctgactaacaagtgaaaccccgtctctactaaaaatacaaaaattagccaggtgtggtggcacacacctataatcccagctacttggggggctgaggcaggagaatcacttgaatctgggaggcagaggttgcagtgagctgagattgtgccactgcactccagcctgggcaacagagtgaaactccatctcaaaaaacaaaacaaaacaaaaaacaaaatgtacgttagataggcagagggcaattaatttgaaccttagacaaccagcttaaattaagtaattgtaattgtagctttttaccagaatgtcatatagattgtcagaatattagagttagatttgtgagaggagagtaagtctgtgtctgaaactactgacttgtcctggggagacaggttcatggcagcaacattcatgattatcagacactgcaaaggacagtttttaagagaagaaactgcactttaagcgctgtttacattgttagttttagatgatgtaaagaccattttatcttacatctgatatagcttgccttttccaatattactgtttagtaattttcattttatagaggcttataatatagtttttgatatgttgatgtcttaccaattcatcattttatgaaatcagtcttccttttccttaagtctatatccatgttcttcaattcattaagagctattgtgtaatttttaaaataatttaattttttaagaaaggaatgaaaaatatatgtgattcagtattcatttagtaaatatttacttagtactcactctgtgctatgttctttattatgttagagcgaataaatgttatgaaaatgaagtagggtaaggagataatgaagttctagactgtgttgaggacagtgtttaggtagtgtgtgtgtatgtgcatagagagggctaattttttaaatattatcaaagaaagcctcctaatgaattttggacagagacgtaaatggaaacagggagttatctgtgtggttgtataaaggggtaatggtgaaagtgttcagcagttagtacagcatgtgtaccaacctatcagaacagatgccagcagcaaacaattcgaagagccgtagaggtgtttactgactgtctattctccttgtgtacctggggaagagtgtttgctggtgtgattgaagaactacagaggttagtatggctgaagcagagtggtcaaaagggagagtgatgggagatgagcgcagatttggattaatttaataattaatacatatcatcttaaaaggccagtttttctttgtataatttaagaaattcacatcatttgagtagaaattcagcataaaattttacaagttttcatagtgggtctcttgaaacaaaagatttatgtttaatactggtagtgaatttcaagggagtatatttagtagaataggccatccaaataaattacagtaaattccatgtttttatttctaagaacttttttcccagtaacattatttttggaggcatctagttagctgtgcttttgcagttaatcattttatgctgtcacttgtatgggcttttcaaaaattgctgtgtgtcgaacatttgaaaagacataagagtgatctttatttttagctctttaaaattagataattaaatatcaaattggatttccaggcatggaaactcacagtttgaaaaaaacgttctgaactggaatactcactgttaaggtttctatttaattggcttttttaaatcaattaattaggtctattgagagtgaagagcacaaaaaaattacaaaatgttctttttaggaaatttatcaggaatatataaatctccatgtcggtcttggatttgagcacagagaatccatttttaaatcccagttttcactattatcagccacatcttcttaggcaagccagccttctaacttcatctgtggcctacaataacctcacttgttataaaaatcatgtgtgaaaatctctgtagttatatggtggaaactgcaaaatagcgtatagtttttgtttgaaagcatttttcgcaggacagataaataattaacagaaggaaaatttggagcattttaaattgtgaaagaaggaaaaaaaacacttgagtactgttgagaatactctacctctattattttattaaatcttttcaacaactgtgaatttgattattaatattatccccattattaggtaaggaaactcagacattataatttaccctaaatcaaatttactgtaagtttcagagttgttacctgaaagggattctgttctattcatcatcttttaattacaactccagctagcataaatcataatctctactatctgattaatgtcaatagcttaacaaaaattttttctatactccaatattttagcaccaggatataagtgaacttaacagctatgtccccaacccacatgaaagtctagcagagactataagcgtgttgtgctaagggaaatacagggtgatatttgactatatagtcactacttagtatagtctgcaaagttaaattaagattggactttaggcttgatctacttaataatataaaagaaccctaccatggtacatatatttaataacacccagactgatttttaaaactctcatcctctaccagcagatattttgaggaaaagcaatgctagtatcaaaaaagtaatagactttagaaaccactgatgttccataaatgatacttcaaaagtttcacatccataagcctacctcagactttcttaaatatcattatgtttttagtcagaagagccaggttttcagtaattacttctatacattttttttgcctactttataaatatttgaagggaaatgggcataggcaggtaaggtctattaaaagaataagtcattggaattttttaatgcaaattgaaaggcaggatttgatatttatagcacaaacattgcctgatattcaccatttcatcattttaaagtatttattatacttcctttttcttttctttttttttttttttttgagatggagttttgctcttttgctcaggctggagtgcagtggcatgatctcagctcactgcaacctccacctcctgggttcaagcaattctcctgcctcagcctcctgagtagctgggattacaggcacgtgccaccacgccgggctaacttttgtgtttttagtagagacggggtttcatcatgttgctcaggctggtctcgaactcgtgacctcatgatccacccacctcagcctcccaaagtgctgggattacaggcgtgagccactgcgcctggccaagtatttattatactttctatatgcatggactttggaaagcatttctacaaatgtacttttgtagaaatgtacaacaaaatgtacaatatttctgatatgaacatggatgtataatgtataattctcccctcccccatttcttgttggaagccatagaacagtaacaaagagtaacatacacagtaacattgaacaaacatagaacaaacaaagccatagaacaaaaacaacaaaaattggaaaactcgtaaactgcatttttcatgaaacagggacttcagagtatatcataaagtagcccaaagcaccttatgacacatgatttttctcagtcactttgtaagccacggaccttcagccagtgatgcccccacctaggcctcacacagccactttacttgctgcaacaggtggcctgctcacttggcctgcccgggccaaccctggcttatgcaccagctcagcccgcctgtgttatagttggtatcacattcaactgtttccaagttcttgtcctgcgtccaagaagaataaggatacactgacaattgaagggtgatgagggcagagaataattttattgagcaacaaaacggctctcagcagagaggggacatgagagtggtcagctatcctgagtcagctggtttctctcccagtgtggctaagtctgggacttctatgggctcagaataggggagtgtgtgctgattggtttgtgagtatgcagaaaaggttaaaagaaaggcaccactgaaagttgggcatgacagtgtgaaaaaccaattatgacgccaggcacggtggcttacacctgtaatctcagcaatttgggaggccgaggtggatgaatctcctaagatcaggaggttgagaccagcttggccaatatggtgaaaccctctctactaaaaatacaaaaattagctgggtgtggtggtgggcacctgtaaccccagctacctaggaggctaaggcaggagaatcgcttgaacccgggaggtggaggctgtagtgagccaagattgtgccactgcactctggcctgggcgacaaagcgagactccgtctcaaaaaaaaaaaaaaaaaaaaaaaacaattaggaaagggtaggtatgagtaaaacaggtgaaaggtggggaaagtgtgccaaatgggaagacaggctctcaatgtagtccatagtttgacttgtggcttggctttctggctttaaactgaaaaagcctggaggttttggcttggagttggggtttcactggggacctgcccctatctgcctaggcgtttgtctgcctcttgctgctatcacatagattgtggagaaatcacataataataaagttaagagaagatataatcagagaaacaagctgcaatgtattttaccacctccaacaaaaattacctgctaaaagtggccgggcacagtggctcaggcctgtaatcccagcactttgggaggcaaaggcaggtatcacttgaggtcaggagttcgagacaagcctggccaacatggcaaaatgctttttctactaaaaatacaaaaattagctgggcctggtggcgcatgcctgtaatcccaactatttaggaggctgaggcaggacaattgcttgaacctgggaggcggaggttgcagtgagccaagatcatgccactgccctctagcctgggccacagagagaggagactccatctcaaaaaaagaaaaaaaattacctgctgaatgtgaagaatgtacccttaaattctaaggctgtattccttgcttacaaaaatggatgtgagaaagggatgaaggaaataaaaatttatgtgatatgttaattaatatagccaaaactgcccttggaggaaaattcagagccttaagtacttgtattaataaaataaaaagcatgaaataaatgagttcatcatctcacccaaaacgaggaaaatcaaacccacaatcaaatcaaaggaatatggaagaatggaagtaataaaactaaaagcataaaggaatgaattagaaaagggaaaaatataatatgtatataatagttgcttttagaaaataataaataattaaaatacttgttaatataatcaatacaaactcataccacaaaagggtgaatctcttcaatatacagtgtgctactagaaatggataaggacaaccaaataaaaatattggcaatggatatggggctactttagaaaatagaaatacaaatgattttaaatatattaaagttgatttgccccattctcagtaaaataaaggaaaaataaaaatatatttattcacctattagattagcataaatttaaaatttaataacagtgtcttgacaaagatgtggataaaaatgctctttgatactttgctgttgaaagtataaattctcaacaacaacatgaaaaaccactatagaaggcattttggcagaatctgtcaaaactgtaaaatgtatatatctttgattcagcaataacacttttacaacttatcctttagttctatgcatgtatgaagttgtgtcattccaaggttagtcactgcagcattgtttgtaatattaggaaactggaaatcattgaaattttcaccattaggggctagttaaataaattatagtaccctatccagtggagtactgtgaatgaggaagttctatatgtactgactggggagagctccaagagacattgttaatacaaagaactaagctgcaaacagtttaggttatgttgttaccttttatataaaaagggtaggagtatgattataagtctgattttgcttttatgtgataaagaaacttaaaaataatacaataaacaataacagattacatgtttggggaggtggttgaaattgaaagcagaggtttaggggaaactttttacttgttatattttacattttaatttttttgaacactgtgaatgtattacctattcaaaaggtaagattaagaaatattgaaaacatggcacctgtcctcaagcaaatataaatttttaggatgatgctttattgagaaattattgataagaagacaaaatattcatgctatatattgttaaagtaggaaaagcagtttataaaatagcattatggtatttatctgatttttattaaataaagtatagatatccaaatacatggaaaaagttggaaggctatattccaggatattaattatgattaccttagagtggagtagtaatgggtgatttggggcagtttaaaaacgtttttcattgaacatgttactatgtttgtaatatgaacattttctaaaattatattacatgctaatgttttgtagaacactatagagcaatgttttaaaaactatttttcccataatttatatgaagaaatcgcattgtagtttaagactcaggacacacaaacttgagagtattgatatttatgtgtgtgcgtaactaaaacaagttttccaaacactgttttatgcttcctaaatgagctgcattatatttaatttatttgatttatttatttatttttatttatttatttttgagacggagtctcactctgttgcccaggctggagtgcagtggcgcaatcttggctcactgcaagctctgcctctcaggttcacgccattctcctgcctcagcctcccaagtggctgggactacaggcgtctgccaccatgcctggctaattttttttttgtattttttagtagagacggggttttgccgtgttagccagcatggtcttgatctcctgacctcatgatccatcagcctcggcctcccaaagtgctgggattacaggcgtgagccactgcgcccagcctatactttatttttagaagtgtttacagccaataagttggtttcttgaacctcaatttgaaaagtatttatatgaaggatttttaaaaatcaacaaaagctatttctaaagtcgcagtatgtgttacgggaattcagaagagaggaaaaaattggctgggaatggtttaaaaaggaaaatgaacttgaagtaggtcttgagaataggcagaaggaggaggagggaaattatttgataagaggagaagctaaacatgggaaatttctaggcctgttttaagtcaggcaagatcagtttgacagaagcaggtgatttggaaaggtgaataatctgaaaagtttaggttaaaatcagatttttgaaggccctgaataccagaattgtgatggaaaatgccattctggtaaaggtttataagcaaaggatggatgtgatataagcacatcttaaatatgatggtgataccacatacttcatacctcatatgtgagatatatacataactcactaaaatattgaaactattccgatttttaattgtgggaagaagttaaggaattcattggcacacttaacagaaaaaaatcaatgttcattttaccatgtttcaaatagtacttgtgtagctaaaaccaattcctagtataataatgttaaaataggagtagaaacacaatggccaggctcagtggctcacacttgtaatcccagcactttgggaggctgagatggaggatcacttgaacctgtctcaaaaaaaaaaaaaaaaaaaaaaaacccagaaagaaagaaagaaattctcagtactggagaaaaataagtaatggtaggaattcagaaatagtaaataaaatacaggcttctaatggcctatgtataatttccttgttgagcttaaaatttagctgtaagcttcctggaagctgttacagaaaaggagttagctaatttcatgattagaaaggaagaaggattttaatttgtttaaagcaaaattttactgccagtaagttctaagggaaatttctctcttgggattttagataacagtgtcctcaacaatatttttgtacaagtttagaaacagatctcataggttgttgattttagcatcctttaaatgtagccaaggttataatattaaaacacagcttaataaagaacattctacatcagcattttccccctattttcaatttttcctgaatagaatagtaaaattctaggactccagacttatcaaaatattaataaaaattagcattaaatacattaaaaagtttaaacaactcagaatatcaagggttatacatatgacatttacaaatatctcatgatatttatatacctgaacagtttaatatttagtcaggttcgtagagaatgcacatgctgagtgaaaacaaacattaagatgtaatgaattgttgaagttttttttccctttaggctttgcacttttgaaaatatgtttccaatattttattttattttataaattatcagttcaaaattacttaatttaatggaggttcaccatcttctttaatgttttgctttttagattttgaacttagacattgaggacacatttgatattctataaaccccaaaagaacagaggaactctgatacaaggattattagtgtttgtacttctatagttcaagcagaagaaaagtggttatcagaatggagggacagatgagaggtggtaaggagtgagtgtggtgagtctgtgagcagtaggagtgtgacagagagaagagggtaccttctcggcctctgtcttggactggtctcttcaacccacataaccccttattcttagtagtctcctccctctgtccctacctgcagctcacatacacttctgaggcagaacatctcgcatgatgatattttcattattccatcttcattattagtctcctttagttgacatacatactcataaagcatctcataaaaagtcttcttcctcagcttacattgatctttgaagtagttatggcatttaatttattcagtcttgtactatgttagttttgtatatctgacgtgcccattaaaggtgtttgagagcaataaggatatttttactcacttttttgtatctctcagagtcttacgtgtaatatacattcagtaaatacttgatattatttttgaaaaaatctagacatctaagaagtgcccaatataacatttgaaaaatataaacaagactcatattctattttcagaataatgtagaaattttggcttttaacgattccagagttgggctttgtttacatttatgtgtggcatctctttggaaataagatatatccagtttcaattctatttgtacagtaatttactttctatttttaaattatatttgaagtgagttttccatgtagttacagtgctcttcggaaacttcataaatgtttttgagtacagatagaaaacatttctggttgcactcttattcagcttatctgtattttatactacggcaaactatatctaattgtttccattaaatttatttgacaccttgatgagatttctctctgatattaaagtggtgacacaatcttgtgtaatatttaatattccttatttgaaaattaaagccctgtattaacccatttgaaaagtgagaatgatatacaagaacagacatacttgttttcactttaaaaaacaccatttatctttatcatattaattaaattagtgttcaccttctgctaccttgtccttcaagggaacgatttaattgtgccacaaaaggcttgtcccacattctattttatgtagactaagtttgcatgctaagaattttaatgacatcaaaatactaggatttaagttagaaaaaccaaagacattaaaaagatatctgcaagtgatttttaaaaaacgagaaacctcattgtatgtatttataagccttacagaaaaatgaaacttctttttgtttttttttgttatttatgtaacaatttgtatatattaaaactacaccaaaaatggattttgtagcaggaatacccatagagagaaattacaatcttgtggacatccttgaacgttgattgatagttatttaaattaatgagaaatagaatcaacctcagcaaaaatcagttacaatttcttatgtgtctcttagtaatcaaggatcctcatcttcacaccatagctctcattgtttcatggtcttaccatgagggatacttcctaatggtggcctataagaggtatgattttctcactactttctagtaatgctgtattctcttttaaataataaatctatatccttttttgactctagaatcacttcagttggagaccttaggaatcatttcttaatgttcataatactggatcatgagatagtcaataaagttttctgagtcttctctagaaataagtttgaaaagacttcttcacttctattgcagtcttgaatgtgggttttcaggaagatcatcaatgttcatctgaaataaatagtagaaattttcgaggaatcccacagctcttaagcatttttctgattatctcttgagttaacattcaataaatacgtatttagttgcttagtatatcatagaaattatattaggtactgaggatacagtgatgactatgacaatatttgcctcaaaagaaattaagagtctggttggcaagatagattagtgagaattcattcatgattgaggtgatgaaccccattccagaggaattttatggtattttaggggacatagtatgttagacagttgaggaaaggacaaaaggtgggctgagttgtgaagaatgactacaactgcactggtgaagggcctgagacagcatagtttttcagaggaggtgcatctgatcttggggtgaaaaattctgtggcacatttgaagaactatttgaaggattctatcttatacacctggagtggagactacattagtcatcagggaaagagaggaaaagaggcatggtagatagaataatggctccccaaatatgtctacaccctaattgctggcatctgtgaataggttccattacaaagcaaaaggaattttgcagatgtgactatgttaaggattttgtgatggggagatagttctggattatccacatggacctcttgtactcacaagtattcttacctggaagaggaaggtagaagtcgtagtcagacaagaagatatgcctacagtatgactacaaaactagttacatggccaaggtccaaggaatgatgacagcctctagaaactggaaaaggcaagaaatagattatttccttataacctgcaaaaagaacatagctctgcagacattatgattttagccccaagagactcattctggacttttgacctccagaactgtaaaataataaatttgtgtttactataaagacacatgcatatgtgtgtttattgcaatagcaaagacttggaaccaacccaaatgctcatcaatgatagactggataaagaaaatgtggcacatatataccatggaatactatggagccataaaaaagaataagttcatgtcatttgcagggacatggatgaagctggaaaccatcattctcagcaaactaacacaggaacagaaaaccaaacactgcatgttctcactcataagtgggagttgaacagtgagaacacatggacaccgggaggggaacatcacacaccggggtctgtcgggttgaggggcaagggagaggagagcattaggataaatagctaatgcacgcggggcttaaaacgtagatgatgggtcaataggtgcagcgaaccaccatgacacatgtatacctatgtaacaaacatgcatgttctgtacatgtatcccagaacttaaaataaaataaaaataaatttgtcttgcattaagctactaaatatatgacaattagttacagtagcagtagaaaactaatacaggaggtgaggttggagaagggaaaaggtgccaaataataacatttcatcctaaagggtttgatctttgggggcaacaggaaattttgaatggtcttatactaggaaaagtcatgatcagatttgtattttctacggataattatggcttcatcttggaaatcacttagtgagttgttgacaggtaagaaatagaagtgacaatgagatgtaaaaatgtaaatttgggttttagagaatgattaggtatttgtgggggtgttgattgctggataaaattacgaatcattagcttagttatctgtcagaatcactaagacttggcaaagaagttgatgggtgaaagagaggttttaaggattaccttcaggtttataattcagcagctaggtgatgatgtcatggactgagatgctataggaagccaggttaaggagaaaattgggggcatgctaagttttacatatatgtgacatttccaaatagatgtgacctgtaggccgatggatatgtatatctggaatttagaagcaacctcagggccacagatatagatatgggagtcaccaatatgtagagaaaatacctgaaggtttggagtaaatgagaaaatatttagcatgcgacaagggcctatgacagataattcagggatggcagaagaggaggctccattggtctctctcacttatttcttcctttcactcatgttgctgccttatttatacaggctttcatcactttaaacctagattgctgataactcatctacttctctttcctttaggatcttttcctccctcttctcactagaattatccttctaaaataacattttatcctatcagattgctacttttaaaacttatgatacttcttttgcttttgtgaagcaatgcaggcctctttgtctcatcaaggttttctaaggtgggatcctagttcacctgcccaatttagccccttcttcctttgttccctttcctttagccaccctgttagaatgcatatacagttgaccccctgaacaatctgggggtgacgggtgctgaccccctgcatagtcaaaaatctgcatatgacttttgacttcccagaaacaactactaatagcctactgttgaccagaagccttactgataacatatttaacacatattttgtatgctatatgtctatactgtattcttacaataaggcagagaaaagaaaatattactttaaaaattataaggaagagatactacatttatagtattgtactgtatttattgataccgtaagtttgtatcatctgtttacaagatgaatgatctctctgacatggtgggcatctatagcttcagacctcaatctatggtgcatatcaagcaattcaactttatcttgtaatattatgacttttctctgctgggaacatttccagcatcactagtggcactttatgtgggtcccatggtgttattcaaggtttatggtattgcataaaacatgatgaaaaattcacaagaaccacaagagatcactttttactgtgatagagtttagtacagagacaaactgctcacacagagatgattagcatcacacagcattttaagcagatatttgcaacacttgagctcaccacaatagcagtgagaggtagctacaaaattattacagtagtaatgtatgtactacagttaattttatgcagttgtgatttaatactgcatttttatgttcatatttttctgagctataaatggcaccatgtatggtctgtttgtgtataaattctgataaattttaactttttataataggtttatgtatattttatggtagtaaataagatagactaatagttagatgtattttatggattcatgacatacctttttcttattttttctcaatatttctaggctaggcaattcatctgcttttccaagttgtctcaaatttccaaaaatattttccaatgtatttaatttaaaaagtccatgtataagtgaatccacacagttcaaacctatgtagttcaagggtcaactgtataataatatagaacctcaaactcagcatttataagcatgaactcattatgttgatttacttctatgttccccactgcccctacttttcagttttggtctttgttaacactatccattctattataaaaacatatttggaatgtttatatactcccttttcctcatccttcacatttaataagtcatgaattcctgtaacttaaacctcataatggctttcagatttgttacctgctctatttccttgctgcggctatctcagctgaggccttcagcaatgtgggtcagacacttgtgaagcgactcctgtttctctcttctctctcttttgtttagatggagtctcactatgtcacccagctggagtgcagtggtacgatcttggctcactgcagcccctgcctcctgggcccaagcgatcctcctgcctcagcctcccgaggtagctgggaccactgatgcatgccaccacgattggctaatatttgtatttttagtagagatggggtttcaccgcattgcccaggctggtcttgaactcctgagctcaagcgtctgcccgccttggtctcctaaagtgctggtattacaggcatgagccatcgtgcctagctaactcctgtttctcttgtttgcctttgtcatgtttagatgtttggaatatctaaaataatgaccgattatgttctttaaatgcttaaaataccctaatgaatctacattactcattgatcaggttgatacattctaacatacaaaaatcctttatagattttttcagtttttccagttgtttctcctgacaatcctttgcatgtctgaagctgcaatttaccaaaatccctttcactcccagaatgtggtctgttatttcatacctttctatctttgtaacgctgcgctctttcttggaaatatattttgggcatcaattctgtttaaagtctttcttaactctaccagttcatattaagtcctcctttccctgtgcttgcatacaattcacaagcatgattacattatttattgtgtagtattgaaattattttttaaaaatacttctgttgtggatttgtgaagtccgggagtatattaattcatctttgtcttccttgatccattgtggcacataaaaggtactcaataaatatgcgttgagagaatgttttaaagaacagaacactatatatactcatagatgcaaactgtgtacatgaagcccaaaacgatctaggcattaataggaatattataattaataagtcagagacaatagtctggttcttactcaaggacgtgagtggcacttacatcccttagattataattctagtagtcaccttcaagaaagagccaatgaaactaaaaaatattcagattggagaaattattgggattacaaacttggaagtgttatgcaactacctgtaggtaaggaaataattattgtttaatgattcagtgatttcttgtgtgtgtcattcctgtagagcttatttgtattattctcaatatcatagatattgtgaatcaaactatttttttagatatttggagaggcctgagttaccactttgattgttggcaaattgcatttccattatttacccttagaaatcctagcttgtggttatagacaattaaagcaatattctttcctgtaaagttcttcctgattatttcctggaagaaatctggcaggaaagcctgttcagaagtcgattcagcttgacaccttctctaccagctgtatctttgctagattatttgtttttcctgtgagacattggacaatatgcttaatctctttccctgaatttcattttctgtacctacttcacagtgttgttggaagggcaaagtggtgaaagcattaactccaaaataaagaaattaagaagtcagtatttataagttacagtttgaacagtagatgtattaagcatttaaatattaagtcagagtcaagagttcaaaaaatattacacggcattactttaagtatagagaaaggcttaattaaaaaattaaaaagtaattcttattaaaatatccatttgctaagtatatcattaaatgtggcataagatcattctaatcttgttcatacttgatataatacaatagaagtttctctctgttactagtgaaaaataattcatcttgtgagccaatttttctatgttgactaagggccatgaggcattgtctcctgttgtgtcctttttttcttataaaaatttattttagaagaaatacttttagtgtgacattgcctttttatatgaatacaagttgaataattaccctcagatagtagtgttcagtgtttagatatgtgcgggtcatctgcactgtttgtgagttgtggaggttctaggaccattacaatgggattaggatccagtgaatatgggatggggcaccaagatctgcattttcaaaaagataccaggtaattatcattaaagtgatctgtggtttgagaagcactgttctaaattacaaaacttttgttttttttctgttcagcccatactgagtaatcaattgtttcaatgaggatgaggaacagaaacaaatccttgaaacaaaacaaacaacataaaaaacaaaatcaaatttttttctttctgtgagtgagatcaaaaggatgaagttacaaatgactgattcagggaaaatcttactgtgaatgacattcatttcagccatgtaccatgcctctatgtataaatttatactggtaggccaggagagagtaaaaaagcaagaagcattgggatccttgaggtctaaaatcttagaaaaagaggaaggccatagagaagagtaaagaccaagaaaatttacaaaggtctaaaatttttgcataaattgaatattcagtattcatctatacaggagagcgtctcttgttttgataaactcctgtaattgttttgattcttctttctaacagaaatattccaagccaaaatagcacttactatttcttcaatgccatttcacctgatgtatatagaaatgtgaaatttcatcctcaattcccatgtcacagactaatctgtttgaaattggttggtttttcaggccctttgcaagatcaaaggaagcatttagaagtcataatgaagaaacagtgtttataggtttagaccgataacagagtgaatttccaaacacccttcagaagactgagcattttcattattgtcacctgattgtcatagtccatgagtgattgttgaatatcctctgtgggtctgaccctattactgaattatttgaagaagcaaaagaaacaagtgttttgttggacagatataacattcaacttataattcagatttcttgtcatttgataaaattttagtaaaaactgaaaaacatgtttttgttaaaggggaaaagaataacttttggtagggttttttagagaagaagtgagcacacgctgttggaaaatgacatcaatagacttgattgacccacggttgccaaaccttcaatttgtaagaaatatctacaaatcacagtaaagtgaagcacaataaaataaggtatgcttgtattatagctcattattgtgtaaaaggtaatacacaatcgctgaagttttttttttagttcataattgaagcttaataatgtgttttagtttacttccattgtttaatgactgtagtatttaaacataggaaaaagtcagagcatatttatgggggtcattgatttatatatcttgcttaattcccctaaaggattaggagacatttgcaaagctatgttaaatcaaacaggctaaaagtgaggggatgttgaaactggagagaagagaaaaaaagcatatatacatatttaaggagggtataaatacatattccctccttatataaggtaaatattatacagaaatgtttatcaaggttcctctaaagtcgatataggctacacattcagttctgagtgggtaaacaataaaagtgtaaaataaaggaaggtgctgaagagaacagctgtgcatagtcctgagaccttagagatagcttttgtaaggctttaatcagaagactagcatttatttaataaacatttatatgtaatataaatcagacattgttctaagtgctttactcattaaatttttgtaaaaatcttacgaggtggatattattttcctagttttatggatgaggaaattgaggcacagagaagttacataatttgttcaagactgcataactattaagtggcagagcttggattccaacccagacattttgacttgagggtattttgtcttcaacattatgccatgctgcctctccaagtggcatctaagaggagagtgcctgtaatttcatgttcatagtaagagtttattgaatttttgtgcctgtttcttataaccatcaatgatgctaattaaggaccactgacactgggaaacatgagtactttcccacttttacttatagacctccctgtggctcacttcttagaccagaggttttgaaagcgcaggctctggaccagtaaagtcaacatcacctgggaacttgttagaaatgcaaattttctgactccaccccacacctacagaatcagaaactctgaaagtagggcccagctttctgcgttttaatgacacttctaggtgatttggatgttccctaaagtttgagaacctgtaacataaagtaatctagatggaaagaaaaaaagggtatctggagcctgtaagttattgttatgaccttatctttgtaatttagatggagaatatagtaggagtttgtagtaaaagcacgtgcattctacctttggtaataagagaaaaaattgcatttatcagggactaggctggtaattatttgaggtataagcaatgacctctttaaactttaatcatctccaagcatcctaatgatcaagaatcagtggtgcagaaatacctattttatggctttttggagaagttgatgttccaaaattgatttttgcagtcttatagaactcaaaagaaaggtatccgaaataatattctgcattaacactattttttcggtattcctcttatgaactattcactgcaatcattctgaagtgatttgaaacagtaaatagtaaagttcatctttgtaagaattataattcttaaacctatgtttggtctgtcatattttaggttgagtcaagaaagctactatgaagattatttcttcagaaatatgtccccaactcctaggcaattatcagatattccctacacactttagttttccttctcaacatttttctcttttttttgtaattatgcatttattagcatttacctacttaagcctcattttctcatccataaaatggtgataattttacctcattggttctgttgtcttaaatggcatgcatactaaatatgttaaccgtttctgttatttattactactactaatatactaataccactacacagtaaaccccatgatggcaaagatggtatatattttgtgccattgtgttccctagcacctagtatgtattcagtaaatatttgttgaatgagtgaattgataaattgaataattctaatcttgatgagatgctatgacaatatggaaatatgtacggggtcaggaacaattttggacataattgagcatcatattgaacatttctgttcaatgtgacttctgaaaaaggaattactagcacaaaattacaaaaccaatagcatctctgactaagatttatacttagaccataatttaacactttttcccagtctgagctctttactgcttcctcaaaacccctattcttttactttactgtatgcttccttaaaatgcctttgtgcttttggtttaaaccaagttgaaatctaattatattttaaaattgagtagattttgggcagaaatatggacagctgattcatagtattcttctaggtatgaaatatatgtaaagtagtaaattaatttttgtcctctgatgacagtgaagtttttgacattacagtcatccttagtagtttcatcaacacattaagcagatgagtagtatttctaagccatatggaattcctaagttgagagcagagggaacactggagttactcatctgaagtctgtgggtgaaatttgactttaagcggtttacaattttaatggcagaatcaaggtcatagaggagcaagagacatatggtgatttaaacagctcctgatttcaagtccttctaggtcagctaaaatgcactacccagattcttcttccaaaaatgcatagaattatgagacatctcaaatagctactgaaagcaagctaacacaccggtatacttgtgctcacgctttcattctccctttgctctatcatcctctctctctttctctctgctttcttggtttctttcatgcagtcagcaaatatttattgagcacctgctttgcctctggtgctggcaatacagtaaaaaaacaaaacagacacggtgcctactcttcttgaaatgtatactctggggactcatttaatttttcaaaaatattattttaggtcaagttctactagcagttttctgtcctttcctttgcttgtcttaccttttattcttccaaaagtaaaagatccctaaaagttttcccagaatcctgtcttaccattcttatttcttaaaattctctttatggggagttaaagttactgtaggcaaagatctagaggaatatagaaaaaggaattgagaatgtgttcaccagatgtacagaaacaattctattagtcaagttaataatagctcagaagatataaatataaaaattgtataaaatgtcctacgaaatcccagttattatatatacaagtttaaatatccttagggaataaagctgaagagtataagatttgtttgaaggatcatcaaagcatatttgaaaatactatagaagaaaactaactgggaactgaaattattcttatcccaaacatgatgttggagaataagtaaatgccacgatagttttttttttttacattctgtattattcattgagttatatttcattgaatataatacagtacttaatatttattgagtattatgctcatgtctttttattacactgaaaaacacacaaatatgacaaattgtcatttatctaaaagtacgtggggaaactgtaacaaaggctatatcaaaaatcaattggaaagggaattttctctcaatccgtggtggtgagataaactggtagcaatttggtaaggcaacagtttagacattgcttttcacagtattatacttttaaaatgaattagaattacatataaaatcaagttgtaagaaagaataaaatataacttaatatttataaacttttggacatggagataagacatttagaggttagaaaacccacagaaaataaaaaaggttaatgttagcaattttgagtatctaataatattctaatctaaaatattaaaagaataattccaagataataagacaaattacgaattaaaactagtgcttatcatacaaataactcataaaaatagggagaaacatactacaaattcagggtttaaatggagagtggacatgggctgacaggtcacatgagagtgactaaaattgtttttaaaaataaatgtaaagtatgacaattcaatgtaaccatatgtacaaatatagctctgaatagattttattttttgaaacatttttagcaaaatttaaaaagctggaccataacgggatgatatctttacagtaaatagtaatataaattgttctactctttgaccttttaatatttttgttttttcgtgcatttaacctgatagtcactatttgtttctttccactttttaaaagtttttttttctctctttctttttaaataggtttctggggagcaggtggtgtttgcttacatgagtaagttctttatggaggttgtgatttctgagattatggtgcacccattacccgagcagtatacgctgtacccagtgtgtagtcttatatccctgattccctcccaccatttcccacgagtccccaaagtccattgtatcattcttatgcctttgcatcctcatagcttagctcccactcatgagtgagaacatacgatgtttggtttttcattcctctgttacttcacttagaataatggtccccagttgcatccaggtggctgcaaatgccattattttattctgttttatggctgaatagtgttatatggtatatatacaccacaatttctttatccactcattgattgatgggcatttgggttggtttcatatttttgcaattgcaaattgtgctcctgtagacatgtgtatgcaaatacctttttcgtacaatgacttcttttcctctggatagatacccaatggtgggattgctggatcaaatggtagttctacttttacttctttaaggaatctccacattgttttccatagtggttatacttgtttatattcccaccagcagtgtagaagtgttcccttttcaccacatctatgccaacatgtattattttttgttttttttattatggccactcttgtaggagtaaggtggtatcacattgtggttttgatttgcatttccctaatcattaatgatgttgagcatttcatcaaatatttgttggctaattgtatatcttctgttgagaattgtctattcatgtcgttagcccactttttgctgggtttttttcttctcttttttttttttcctgatttgtttgacttcattgtagattctggatattagtcctttttcagatgtatagattgtgaagattttcttccactctatgtgttgtctgtttgctctgctgattgtttctttttctgtgcagaagctttttcatttaattaagtctcatatatttatctttgtttttgttgcatttgcttttgggttcttggttatgaagtctttgcctaatccagtgtctagaagtgtttttctgatgttatcttttagtatttttatagtttcagatcttaaatttaagtccttgatccatcttgagttgattttggtataaggtgagaaatgaggatccaatttcattcttctacatgtgactttccaattattccagcaacatttgttgaatagggtgtactttacccactttatgtttttgtttgctttgttgaagatcagttgactgtaagtatttgggtttatttctgggttctctattctgttccattggtctatgcctacttttatatcggtaccgtgctgttttggtgactgtggctttatagcataatttggagtcaggtaatgtgatgcctccagatttgttctttttgtttactcttgttttgtcaatgacggttcttttttgcttccatgtgagttttaggattttttttttctagttctgtcaagaatgatggtggtattttgatgggaattgcattgaatttgtagattgctcttggtaatatggtcattctcataatattgattctaccccatccataagcttgagatgtgtttccatttgtttgttttttctgtgatttctttcagcagtgttttagtgttttgtagttttaaaaccttgtagaggctgggtgcaatggctcacacctgtaatcccagcactttgggaagccaaggtaggcagatcacatgaggtcaggatttcgagaccagcctggccaacatggcgaaaccccatctctactaaaaatacaaaaattagccgggcatggtggtgggcacctgtaatcccagctacttgggaggctaaggcaggagaatcgcttgaacctgggaggtggaggttgcagtgagatgagatcacgcccttgtactccagcctgggcaacaagagcaaaactccatctcaaaaaaaagaaaacaaaaaaatcgaaaaccaaaatcttgtagaggtctttcacctcagtggttaggtatattcctaaattttattttattttattttatttgcagctattgtaaaggaatttgagttcttaatttgattctcagcttggttgctgttggtgtgtggaagagctactgatttgtgtacattaattttgtatcctgaaactttgccaaattcatttaccagttctacaagctttttggaggagtctttagggttttctaggtatacaatcatatcattagcaaacagcaacagtttaatatcctctttaccaatttggatgccctttattttttttctcttgtctgattgctctggctaggacttccagtactatgttgaatggaagtggtgagaatgggcgtccttgtctcattccacttctcagagggaatgctttcaactttttcccattcaatattatgttggctgtgggtttgtcatagatggcttttattacgttaaggtatatcccttctctgccagtattgctgagggtgttaatcacaaacggatgctgaattttgtcaaatgctttttctgcgtttcttgagatgatgtgatttctgtttttgattctgtttatgtggtgtattacgtttattgacttgtgtatgttgaaccatccctgcatccctggtatgaaacccacttggtcatggtggattgtccttttgatattctgttggattcggttagcttgtatttcttaaggatttttgcatctatattcatcaggaatgttggtctgtagtttttctttttttgctctgtccttttctgattttgatattaggatgatattggcttcatagaatgatttagggagtattttctctttatcttggagaatagtgtcactaggattggtaccaattcttctttgaatgtctgatagaattcagctgtgaatccatctggtcctggacttttttgttggcaagtttttattaccatttcaatctcactgcttattactgatctgctcagagtttctgtttcttcttggtttaatctaggagggtcctttatttccaggaatttgtccgttttctctaggttttctaatttaggtacgtaaaggtgttcatagtagccttcaatgatcttttgtatttccgtggtatcagttgtaatatctcccatttcaattataattgagcttatttggatcttctttcttattttctgggttaatgctgctaatgatctatcaattttatctatcttttcaaagaaccagctttttgcttcatttatctttgttgttgttggttttggtgttatttgtttcagtttcatttagtttggctctgatctttgttgtttcttttcttgtgataggtttgggtttggtttcttcttgtttctttaggtgtgaccttagattgtctatttgtactctttcagactttttgatgtagacatttaaggaactttcctcttagcactacctttgctgtatcccaaaggttttgatacattgtgtcattgttattgttcgttcaaagaattttttaatttccatcttgatttcatttgcaacggtcattcacgagcaggttatttaatttctacttatttgcatggttttgaggttccttttggagttgatttccaattttattttactgttgaccttttaatcttattaccaggagtcagtcctactgaaataatcttcaaatgtgtaaaatctggatgctgagtgttactcgtcttgtttttattataatagaaaaaaatcagaactagtcattatgagaaaacgattatgggagtgcatgaagatggataatgctgatctgttggtctttcaggatttcttaaaaagaccaacaacctttgccaaactgcattctgcaatattcttcagttgctttacattacaaataatcaaatgaaaataattaagaaataaatattaagaaatattaagaatcattaagaaatactaagttccaaaaaatattttattatgaatccaatgaaatattggcctgtttatgagcttcctggatactttaaaaaatcctaggtcatttagcatattcctttctttctgagtgtgaaatattatccatctttccatttttgttttaacagatgaacttaactaatattacatatgtgtattttttctttatttgattacattaggattttctaaacatttttgtatctcttatttataactatttctctcccattgcatcttgatgattagtattagctttgaaaaatgcccaagaaagcaattaaaatagtcattattttagtagtatttcctttataaaaatcgtatgtggtgtaagcatgagaatacattaatacaaaatagtataatatgatatagctagacatttaatgcatttattttaatttgaagaagatagtttgtactatattcaccaatgtttgttttagttattgtaagcagtcacatttttccctctagtcagtctcaggtcaaggagtatgtcataatactttttgtgtccccctagtgccttgtacttactagatactcagtaaatttctaaagaattgattaggtgatttgggacatgtgacacatacaatctatttaattttttctgtcacagtcatataaaagtaagcagcttcttaacattagtgtatattaatacaagcaaaaacaaattttaaattagcttagtcattgaattaaaatgctgatgaaactgaaaggaagctagtatttacatagtattagaaggaaacatgattttgctagcttgttttaacttggtggttttcatttgaattctcctgtagatagatatttaatcaaactttaaaaaatatggttgataataagtttcaatatactagacttagagttttctaaaaatattgtatattacatattgatttatgtatatcaatatttcagcttagaaaattagatacaacttgtatctctattggtgtatgcatgtgtatgtatgtagatacatttcatcctaactgcccacttaatacatttcaaagaaatataaatgtaaaggtaagtatacttgcaaaaaaattacaggtgaagagaaaatgaaggaaattgatgagaggataacagaaagtattataataatgtataaatatttgggaagtattaataggaatgctatatttgggagttgaaagagattaaatggtcttaagagagagagacacagaaaatacatctttataaagccagaaatgagtgagaaaatgaagagtaattattcagtgaaatagatgagtcatctttattaacatctttaaaatgaaggaagcttaaataaaatcaagcaatacagagattctctacccaaatatagtacagaaatgaaatatgtttctagatttacatccatgatttttcacactgatactgctaaaatacctagtactctacttttaatattaaaatatgtacataacttatgaagcaagaaataaggctttgttgagaattagaatgaatatgtatttgcatattgtgcttctgagtttgacataaatatttaatatttagatatatagtatatgtatatatacacacatatatacaaatatatatcttaaacaggggtacttttatttgtaataagacagaaaataagaaaattattaagtataaaggagaaagtttcaatattgaaattaaataccaatattagcatagcatgtctgtctcattttgtatatgtgtatatacgcacatgtatatatgggtgtgtgtgtatttcagctggcttctggattctggataatgcaattaattgaattataacatagtttaattactctaattattgttaaggcaaaggaaaaaagtataggcatattttataatcttaagtgattatagacaatgaagtgtcacggcccccccaaaaacagacaaatttttaacactcaaattactgaaaattattaatttgtttatccatatgtaaggttttataatttaatgaaaagatgtatcattaaaagaaattagcagcttttcagatcgtatactttgatattttatttttttaagagttcaacatttattccaggattgtcatttatatcacatttgtgcagaatttataatcacaagcagataaacttttttttctgtatttcaatatctccttccttattcatttgttattcattcatttgtttattcagtaaggttttaagtttattcagtaaggttttttttagcacttgctattttactcaggaaaaattttctgttataaccactttaaagctctcaagatataacttagccacagaaatatattaaattatttcaaagctttctcttcctttggctgagtaattctatttccttttctttgtattttcttttttttttttaaattaattaatttatttttattgatcattcttgggtgtttctcgcagagggggatttggcagggtcataggacaatagtggagggaaggtcaacagataaacaagtgaacaaaggtctctggttttcctaggcagaggaccctgcggccttccgcagtgtttgtgtccctgggtacttgaggttagggagtggtgatgactcttaacgagcatgctgccttcaagcatctgtttaacaaagcacatcttgcaccgcccttaatccatttaaccctgagtggacacagcacatgtttcagagagcacagggttgggggtaaggtcacagatctacaggatcccaaggcagaagaatttttctagtacagaacaaaatgaaaagtctcccatgtctacttcttcctacacagacacggcaatcatccgatttctcaatcttttccccacctttaccccctttctattctacaaaaccgccattgtcatcatggcccgttctcaatgagctgttgggtacacctcccagacggggtggtggccaggcagaggggctcctcacttcccagtaggggcggcagggcagaggcgcccctcacctcccggacggggtggctggccgggcggggggctgaccccccacctccctcccggacggggcagctggccgggcagaggggctcctcacttcccagtaggggtggctgggcagaggcgccccttacctcccagatggggcggctggccgggcggggggctgaccaccccacctccctcccggacggggcggctggcctggcgggggctgacccccacctccctcccggatggggtggctgctgggcggagacgctcctcacttcccagacggggtggctgccgggcggaggggctcctcacttctcagacggggcggttgccaggcagagggtctcctcacttctcagacagggcggccgggcagagacactcctcacctcccagacggggtcgcggccaggcagaggcgctcctcacatcccagacggggcggcggggcagagacgcttcccacatctccgacgatgggcggccgggcagagacgctcctcacttcctagatgggatggcggccgggaagaggcgctcctcacttcctagatgggatggcggccgggcagagacgctcctcactttccagactgggcagccaggcagaggggctcctcacctcccagacgatgggcggccaagcagagaggctcctcacttcccagacggggtggcggccgggcagaggctgcaatctcagcactttgggaggccaaggcaggcggctgggaggtggaggttgtggcgagctgagatcacgccactgcactctagcctgggcaccattgagcactgagtgaacgagactctgtctgcaatcccggcacctcgggaggccgaggctggcggatcactcgcggttaggagctagagaccagcccggccaacacagcgaaaccccgtctccaccaaaaaaatacgaaaaccagtcaggcgtggccgcgcgcgcctgcaatcgcaggcactcgccaggctgaggcaggagaatcaggcagggaggatgcagtgagccgagatggcagcagtacagtccagcttcggctcggcatcagagggagactgtggaaagagagggagagggagactgtggggagagggagaccgtggggagagggagagggagagggagagggcgagggcgagggagagggcaagggcgagggcgagggtgagggcgagggcgagggcgagggcgagggtgagggagagggagagggctgtattttcaaatacaagttgaggatggttcttctgatgttaatcacttgggtgattcccaccaacagtgtaaaagcatccctgtttctccatagccttgccagcatctgttgtgtcttaacttttgatagttgcccttctgactggtgtgagatggtatctttgtggttttgatttgcatttctctaatgatcagtgatgttgagcttttttttcatgtttattagccccttaaatgtcttcttttcagaagtgtctgttcatgccctttgcccactttttaatggtgttgttttcttcttgtaaatttatttaagttccttgtaggttctagatattaatactttgtcagatggatagattgcaaaatttttctcccattctgtaggtcgtctgttcactctgatgatagttccttttgctgttcagaagctctttagtttaattagatcccatatgtcagtttttgctcttgttgcaattgcttttgatatattaatcatgaaatctttgcccatgcctatgccccacattttctgctagagtttttatagttttgggttttgtatttcagtctttaatccatcttgagttaatttttgtataaggtataaggaaggggtccagttccaattttctccatatggctagccagttctcccagcaccatttattaaatagggaatcttttccccattgcttgtttttgccaggtttgtcgaagatcagatggttgtagatgtgcagtcatagttctgagatctcaattctgttccattggtctttgtgtctgtttctgtaccagtaccatgctgttttggttagtgtagtcttgtagtatagtttgaagttgggtagtatgattcctccagctttgttctttttgcttatgattatcttggctatttggggtcttttttggttctatatgaattttaaagtagttttttctaattctgtgaagaatatcagtggtagtttcatgtgaatagcattgaatttataaattgctttgggcagtatggccttttttatgatactgattattcctatccacgagcatggaatgtttttccatttgtttgtttcctctcttatttccttgagcagtggtttgtagttctccttgaagaggtccttcacttcccttgttagctgtatgcctaggtattttattctctttgtagcaattgtgaatgggacttcattcataatttggtgctttgcttgtctattgttggtatataggaatgcttgtgatttttgcacattgattttgtatcctgagactttgctgaggttacttaccagcttaaggagatttggggctgagactattgggttttctagatgtaggatctcgtcatctgcaaacagaggtagtttgacttcctctcttcctatttgtataccctctatttctttctcttacctgattgccctggccagaacttctaatactgtgttgaaaaggagtggtgagagagggcatccttgtcttgtacagttttaaggggaatgcttctagcttttgcccattcagtatggtattgactgttgttttgtcataaatggcttttcttttctttttttaattattatactttaagttctggggtacatgtgcagaacatgcaggtttgttacataggtatacacgtgtcatggtggtttactgcacccatcaacctgtcatctacattaggtatttctcctaatgctatccctctactagccccccaccccccaacaggccccagtgtgtgatgttccccttcctatgtacatgtgttctcattgttcagctcccacttatgaatgagaacatgtggtgtttggttttctgttcttgtgttagtttgctgagaattatagttttcagcttcatccatgtccctgcaaaaacatgaactcatccttttttatggctacttagtattccatggtgtatatgtgccatgttttctttatccagtctatcattgatgggcatttgggttggttccaagtctttgctattgtgaacagtgctgcaataaaacatacgtgtgcatgtgtctttatagtagaatgatttataatcctttgggtagatagccagtaatgggattgctgggtcaaatggtatttctgattctagatccttgaggaatcaccacactgtcttccacaatggctgaactaatttacactcccaccaacagtgtaaaatgttcctatttttccacatcctctccagcatctgttgtttcctgacttcttaatgatcaccattctaactggtgtgagatggtatctctttgtggttttgatttgcatttctctaatgaccagtgataatgagcttttcttcgtatgtttgttggccgcataaatgtctttttttgagaaatgtctgttcatatcccttgcccactttttgaaggagttgtttttttcttgtaaatttgtttaattcattgtagattctggatattagccctttgtcagatggagagattgcaaaaattttctcccattctgtaggttgcgtgttcactctgatgatagtttcttttgctgtgtggaagctctctagtttaatttgatcccatttgtcaactttggattttgttgccattgcttttggtgttttagtcctgaagtctttgcccatgcccatgtcctgaatggtaatgcctaggttttcttctagggtttttattgttttaggtcttacatttaagtatttaatccatcttgagtttatttttgtataaggtgtaaggaaggggtccagtttcagttttctgcataaggctagccagttttcccaacacaattattaaatagggaatcctttcctcatttcttgtttttgtcaggtttgtcaaagataagatggttgtaggtgtgtggtgttatttctgaggcctctattctgttccgttggtctgtatatctgttttaataccagtaccatgctgttttggttactgtagccttgtggtatagtttgaagtcaggtagcatgatgcctccagcattgttcttttttgctaggattgtcttggctgtgtgggctctttttttgtttccatatgcaatttaaagtagttttttccaactttgtgaagaaagtcagtggtcacttgatggggatagcatttaatctatacattactttgggcaatatggcccttttcacgatattgattcttcttatccatgagcatggaatgttttttcatttatttgtgtcctcttttacttccttgtacagtggtttgtagttctccttaaagacgtccttcacattccttgtaagttggattcctaggtattttattccctttgtagcaattgtgaatgggagttcactcatgatttggctctctgtctgttattggtgtttaggaatgcttgtgaaatttgcacattgattttgtatcctgagactttgctaaagttgcttatcagcttaaggagattttgggctgaggggaggccgaggcaggcagatcacaaggtcaggagatcgagaccatcctggctaacacggtgaaaccccgtctctactaaaaaaaaaaaaaaaatacaaaaaaaattagccgggcttggtggtgggcgcctgtagtcccagctactcgggaggctgaggcaggagaatggcgtgaacccaggaggcagagcttgcagtgagcgagagcatgccactgcactccagcctgggtggtggagcgagaccctgtctcaaaaaaaaaaaaaaaaagagattttgggctgagacgatggggttttccaaatatacactcatgtcatctgcaagtagagaaaatttgactttctcttttcctaattgaataccctttatttctgtctcttgcctgattgccctggccagacttctaatactatgttcaataggagtgatgagagacggggtcagggacccacttgaggaggcagtcttacccttagcagagctccggtgctgtgctgggagatccgctgctctcttcagagccatcaggcagggacggttatgtctgctgaagctgctcccacagctgcctctttccccaggtgctctgtttcatgaagatgggggttttatctataagttcctgactgtggctgctgcctttttttcagagatgccctgcccagagaggaggaatctagaggggcagtctggccacagtggccttgctgagctgtgtgtggtaggctcctcccagttcgaaattccctgtggctttgtttacactgtgagggtaaaaccacctactcaagcttcagcaatggtggacaccttaccccataccaagctccagcatcccaggtcgacctcaactgctgtgctggcagtgagaattttatgccagtggatcttagcttgccaggctccgtgggtgtgggacctgccgtaccagaccacttggctccctggcttcatctccctttccccgggggatgaacggttctgtcttgctggcgttccaggcaccaccggggtatgaaaaaaaaaaaaaaaaaaaaaactcttgcagctagctaggtactgcccaaacggccgcccagtcttgtggttgaaactcagggccctcgttgcctagccacctgagggaatctcctggtctgcggattgtgaagactgggaaaagcacagtatctgggccagagtgcagtgttcctcacagcacagtccctcatgacttcccttggccaggggagggaaattcgctaacaccccttgtgcttcctgggtgaggcgacatcccatccttcttcggctcgccctccattggccgcacccactgtccaaccagtcccagtgagatgaaccggatacctcagttacaaatgcagaaatcccctgccttctccctgggagctgcagactggagctgttcctatttggccatcttggcgcattaatggctcttattaatttgaggtatgttccatcaatacctagtttattgagagtttttaacatgaagggatgttgcattttatcgaaggccttttctgggtctgttgagataaacatgtggtttttgtctttagttctgtttatgtgatgaattacatttattgatttgtgtatgttgaaccagccttgcatcacagggtgaacctgacttgattgtggtggataagctttctggtgtgctgctggattccgtttgccaatattttactgaggatttttgcctcgatgttaaagtgatttatatatgttgtattttagaaaaggttctagagaactctttgtaggttgtttttattactttgatacataatatgaattgtttcaaacatgaaaaaatacagagactaaactagtaaatacccatatatgaactaacttttaatttttttctaacatttgactgttcttgctttagtttttttaaaagtaagaattgaaacattatgcataaacttgtagccttccttgattctatgttttttccagttagtgttatctataatacttctctgatttctccttccttgaattttatactgttacttcactgtgctatttgtactagccatacacaatatgtctttgcatgtttatcatttgttacgttttaaattttttatacaattttactattctgtaacccagttcttagtactgaacatttaaaaaattatattcacctgtatggatagtgtggctctggttcatttgtttcaactgtttttaatttttaaatagatttttaaaatttatggatgtaacacaattcatacatttttctttaaatggatatttttatttgttttgcttttaattttcactgacacaaacagaacatacagaagattcttctagagatgtgacgtatgtgtgagagtttcttttattttgtatacctagaagtagagtaccaagaagaaagggtctgcatgtcgttaattttattagatgttgctaaggtgcttcccaatatgtttgtaccaatttatactcctatcagtatggcaaaagagttttcatttatgtacacctttaccattcttactattttttttttttgccatcctggtaggtatggtttcaattatgttactagattagattatattttttgattactagatgatttaacatcttttcctgtgtgtattagctcttctgttttccacttctatgtattactgtttaaatttgcttcaatgtgggattatggattgatttttagtctcttttaataagtaggaggaaagccctttactataactgtctaatttcactacatagcacacagtagtacagctgatttggggcattaactctgcatctctcttctctgaaagtatttattttgtttctgagtccagcagtttttttgattctttctctttatatttttctgcattgctatgtgttggacgctggcatagtcttttaatgtatatatttactggttaatgttgacctttttttcataaagatgatatataatatatatataagtttatttgagactaaattgacttaggaaaaagacacaaatggaagaaccatagtttatattaaaatgtaaaacgtgtttatcaaaaagcatcataaacagaattttaaaattatttgccacatatttaagcagacattaatttatttaatatatagagtacatttgttctaagaaaaacaaactctctagtaaaaaaaaatgagtaaagaaagagaacaattcatgaagcaaaacaaatggatagaaaacatattttaaaaatatttatcgctaaagatgttctttgaaaccaacgagaaaaaagacacaacattccagaatctctcggacacattcaaagcagggtgtagagggaaatttatagcatgaaatgcccacaagagaaagcaggaaagatctaaaattgacaccctaacatcacaattaaaagaactagagaagcaagagcaaacacattcaaaagctagcagaaggcaagaaataactaagatcagagcagaactgaaggaaatagagacacaaaaaacccttcaaaaactcagtgaatccaggagccggtttttttaaaagatcaacaaaattgatagaccgctagcaagactaataaagaagaaaagagagaggaatcaaatagacacaataaaaaatgacaaaagggatatcaccacctgtcccacagaaatacaaactaccatcatagaatactataaacacctctacgcaaataaactagaaaatctagaagaaatggataaattcctggacacatacactctcccaagactaaaccaggaagaagttgaatctctgaatagaccaataacaggagctgaaattgtggcaataatcaatagcttaccaaccaaaaagagtccaggaccagatggattcacagctgaattctaccagaggtacaaggaggagctggtaccattccttctgaaactagaatcctccctaactcattttataaggccagcatcatcctgataccaaagcctggcagagacacaacaaaaaaagagaattttagaccaatacccttgatgaacatttgatgggaaaattctcaatacaatactggcaaactgaatccagcagcacatcaaaaagcttatccaccatgatcaagtgggcttcttccctgggatgcaaggctggttcaacatacgaaaatcaataaacgtaatccagcgtataaacagaaccaaagacaaaaaccacatgattatctcaatagatgcagaaaaggcctttgacaaaattcaacaaccattcatgctaaaaactctcaatcaattaggtattgatgggacatatctcaaagtaataagagctatctatgacaaacccactgccaatatcatactgaatgtacaaaaactggaagcattccctttgaaaactggcacaagacagggatgccctctctcaccactcctattcaacatagtgttggaagttttggccagggcaattatgcaggagaaggaaataaagggcattcaattaggaaaagaggaagtcaaattgtccctgtttgcagatgacatgattgtatatctagaaaaccccatcgtcttagcccaaaatctccttaagctaataggcaacttcagcaaagtctcaggatagaatatcaatgtgcaaaaatcacaagcattcttatacaccaataacagacaaacagagagccaaatcatgagtgaactcccattcacaattgcttcaaagagaacaaaatacctaggaatccaacttacaagggatgtgaaggagaactacaaaccactgctcaatgaaataaaagaggatacaaacaaatggaagaacattccatgctcatgggtaggaagaatcaatatcgtgaaaatggccatactgcccaaggtaatttatagattcaatgccatccccatcaagctaccaatgactttcttcacagaattggaaaaaactactttaaagttcatatggaaccaaaaaagagcccgcattgccaagtcactcctaagccaaaagaacaaagctggaggcatcacgctacctgacttcaaactatactacaaggctacagtaaccaaaacagcatgggactggtaccaaagcggagatatagaccaatggaacagaacagagccctcagaaataacgccgcatatctacaactatctgatctttgacaaacctgagaaaaacaagcaatggggaaaggattccctatttaataaatggtgctgggaaaactggctagccatatgtagaaagctgaaactggatcccttccttataccttatacaaaaattaattcaagatggattaaagacttaaacgttagacctaaaaccataaaaaccctagaagaaaacctaggcattaccattcaggacataggcatgggcaaggacttcatgtctagaacagcaaaagcaatggcaacaaaagccaaaattgacaaatgggatctaatgaaactaaaaacttctgcacagcaaaagaaactactatcagagtgaacaggcaacctacaaaatgggagaaaattttcacaacctactcatctgacaaagggctaatatccagaatctacaatgaactcaaatttacaagaaaaaaacaaccgcatcaaaaagggggcgaaggatatgaacagacacttctcaaaagaagacatttttgtatccaaaaaatacatgaaaaaatgctcatcatcactggccatcagagaaatgcaaatcaaaaccacaatgagataccatctcataccagttagaatggcgatcattaaaaagtcaggaaacaacaggtgctggagaggatgtggagaaataggaacacttttttacactgttggtgggactgtaaactagttcaaccattgtggaagtcagtgtggcgattcctcagggatctagaactagaaataccatttgacccagccatcccattactgggtatatacccaaaggactataaatcatgctgctataaagacacatgcacacgtatgtttattgaagcactattcacaatagcaaagacttggaaccaacccaaatgtccaacaatgatagactggattaagaaaatgtggcacatatacaccatgtaatactatgcagctataaaaaatgatgagttcatgtcctttgagggacatggatgaagatggaaaccatcattctcagcagactatcacaaggacaaaaaaccaaacaccgcatgttctcactcataggtgggaattgaacaatgagaacacatggacacaggaaggggaacatcacactctggggcctgttgtgggttgggaggagcggggagggatagcaattggagatatacctaatgctaaatgacgagtttatgagtgcagcacaccagcatggcacatgtatacatatgtaacaaacctgcacgtagtgcacatgtatcctaaaacttaaagtataataataataaaattaaaaaaataaaaataaaaatatttatcccaagcattcaaaaatttaaatttaaaaaattaaaaaattatagccaggcatggtttctcttacatgtaatcccagcactttgggagctagaggtgggagaattgcttggacctagaatttcaagatcagcctaggcatcatagagagaccccatctctacaaaaaaaattaaaatttgctgggcatggtggcgcacacctgtagtccaagctacttgggatgccaaggtgggaggatcacttaagcccagggggttgaggctgtagtgagctgtgatcatgccactgcacttcagcctgggcgacggtgtaagaccgggtctcaagaaacaaaaccaaacaacaaaccaattgtacaatctttttttttgtcaaattgacaaatattagaaaacaataaatgtcattgctaataatggtatgaggaagtgagcactctcatactctgctgatgcaaatgtaaatccctacaacttttctgaatgacagttgggcagtaagaatctagagctatcctatgctctaaatgaccactagatacattggctacttaaacatttatgtcctcagtttcagtaaccacattttaagccctcatcagcctccacgtggcctgtggctacatattgcatacatcagagataacatttccctaatcacagaatagtttattggctatcactcagtagtttcaaaatattcatatcctttttcaaatactgctatttctaggaatgtattataaataaatattagccatttaaggatcctaaccaaaacattgaaaacaacagcaaaaatgggaaaaaatccaaatgtccacaacaaggagctgtaaatgactataaatttatatgaaaggatattatgcagcctattaaaaataagtgtttggattaatgtcatggtaatatgcttacaaaatatccttctaattgaacagacaggccacaaaacagcatgaccacaaatttaccatatgattacaaatttattttaaaatattttaaaatttacattacagagcattatagtgttggtggttttttatagtgttttctattataatgtactactgttatagtaacaaaaaagtcaaaagtatgttggtttggaacctggttttgcaccttatgaaacattagtgattgtgttcattttaggttgtttgtttcatttgaaattttgtggtggttgacaaatttatatatttattaataagtatcatattaccaaatggttcaaatgaagagttgttttttttatgtttgttttgttttgttttttaataaaaagaactactgataaaagcactccaggattaaggaacaaactgactagggatggctgatttctcggaaactagccacagtaggaacttattactatccatccctagggataaagggacaagaggcagaaatagttaccagaatccagtgtgtgccagaactttgcaaatggggctgcccatgacgagatgatgcagctgccctaaacacagcaagaggaaaggagtgggaaagaaatcagacctcttttcttccacctttggatctcatgctggaatctaactggaggtccatcaacaagacagtcctcaagtgaagtctgaggagtcagcctcctggggcatgtaatagatccaagcaggagagaggatagaaggtgttagagggtgaggcaggttggcaaatggaaaaaaactatcccgtgtgtgtgtgtgtgtgtgtatttctctgtatgtgtttattcaaacatacttatgtaacacatacatatgcggttaatggttggtattatatttacatgagttgtgatgtatatatgtataagcatgtgtcatctatttgtggaagattccaacgtttgtgcatactcccagacacatacaaacatatgcacatatacaagatatttaaattctagtaaatatagaaaacaatggaactagttggaaaagaattctggtttagacagaggagttccaaaaaatagctagggaacctttaggtaacacttgttttagatacacatgctcttgcacaccaatgaaagcatactgaacacacaagagtttaaatttcccttcagttgaagttccttagcagcaaggaccatgtgttctgccttcctgtgctttgtaaactcttgtacagtgcttcacacccaggaagtgtctcactgttgtaagaatgaatgaattaatcattccatttaaatattgttttcactcaaccagagtataacttaagacaaatttgtattcgcttggagaccacttttagaacaattaattgaatgaaaaggaattgtacatttttaaaatatttattgtttttaaccagtattgattaactcagatatactataggaacatatcatgattttgtttatggtactgcacaaagctacttatatgctttttgtaacaacctgatgatgtagagagaagcagcattaagactattttgtaaatgatgactttgaatcttggggaggttaaacaattttcctttttccttttacccttctgtaatgagatagtgaaatgaagaaagctgtgaggagttttcattgagcagttatattgagctacttgaattgtagctgccataattcccacctgttgtgggaggtatctggcggaggtaatgaatcatgggggcgagtctttcctgtgctgttcttgtgagagtaagtctcacgagagctggtcgttttataaacgggagttcctctgcaagtgttctcttgcctaccgccatgtgagacaagcctttgcttcttctttgccttccaccatgattgtgaggcctccccagctatgtggaactgtgagtgcattaagcctctttcctttataaattacccagtctttggtaagtctttattagcagtgtgagaatagagtaatacaagcagtaagcaaggttttgctttttgtgtttaacatatacctgtgatgaaattagctctcttagctttttggctttttgtttttaaaactataacaaaaataggaagggtggggggagaattgttatttacatgtgatttctaaagatgagtaaaaaattgtaatctaagtttttgaacaaacctgttttcattttaccacaaatgtcctctaaaattagcctaaagtgaatgtgatgctcatatggtggggggaaaaaaaatcttacctgcctcacctccacttaattaagattattaaagcaatatattgatactaagagcacaattctggaggaaaactttgatagaggttgtcttcagttctttgcttcaaaagtttacttaactttggtattgaataagattaacatgctatgggacctgtgctttttatattctgatgttgttcagaggtttttattagttgggttattcagaaaattgaggcattattttttagatgggttattcagaaaattgagaaattatttatgatttaaaaagttttaattacattgtctattgatattggccaaatgcagtttcgaagtaatagctcatattctgagatacatgaggtattaacattatatcagtatagtgatcatgttgtcttttaacccaaagtaggagacatcagtctttacagtgtcctttcattttgaaaaggcacttcacattgttttagtcagacttattaagggatacattttacatagagaagtgaaaattaattctttttagcatatagttctgataagtttagacaaattcatatagttgtttaccaccacagtcaaattatagaacaattgcatcagctcccaaaattattctatgcccctttctagtcaacccagctacttaccctttggaaagtgagaatgtcatatacaaggaatcgtacagtatgtgctcttttcaatttgacttcttttatttggcaaagtacaattgggattcatctgtattgttgcacaaatcagtaatttcctccttttattgtgaataacatttccttgtgatgtaccaccatttgtttattcattcctcagttgaaagagtttttgagtttttaacaattatgaataaaactataaacattcatttaaagcgttttatgtcaacattaacttttcatttatcgagtatatacttatgaatgagattggtggtttgtctagtaagtgttcctttaagtttataagaaactgccaaattattttctaaagtggctctgctattttgcattcctaccaactgcgtgagaattccagtgactccacatttttactagcttttagttttttcagtttaaaataaataaattagataattacttttagctactctcataggtatatataatggtatctcactgtagttttaatttgtatttccctaatgactaaagatgttgagcatcatttcatgtggttatttgtgatctgtatgtcttctttgtgggcacttttgacaaccacagaaagacaaactagtggattaaaattataatcttgtactcacggaggaaataaagtgtatctctctttaaccttatattattgagtttattagtacataaaattgacaaaaatcattttattgtctatttaaatgacataatggtaattattcttcctgactacaactatcattaaagatgtttaccatgttcctaatagttctcatgtctaattgattcctctccccatttcccacagctatttccaacctttaccattttttctcaagttcttaaactgtctgtagtttcttcagtattagtcagggacttgcttccttcttttactaagaacctgaagaagaaacacttgcacactccaccagcagttattttcacctgtcctaattttctctgtgttatcgcagctcctctcacctcacccaggtctttgattcttcatttttctctagttaactcatctatcttgtcccttctcttctcaccttccctaggcctttcatgtatcattttctctgctttaaaaaaatattttgcgtatttccttacagtctttttcctcagccactccatccttatcttaaacaataatagcaggccgggcacagtggctcacgcctgtaatcccagccttttgggaggccgaggcgggcagatcaggagtttgagaccagcctgaccaacatggagaaaccctgtctctactaaaaatacaaaattaaccaggcatggtggcgcatgcctgtaatcccagctgctcgggagggtgaggcaggagaattgcttgaacctgggaggcagaggttgcagtgagccaagatcgtgccgttgcactctagcctgggcaacaagagcgaaactccatctcaaaacaacaacaacaacaacaacaaaacaatagccaaagctttcatttcactagtctagtcttcctcttcagtctttttttttttttttttttttgaaacggagtctcactctgttgtctaggctggaatgcactggcgtgatctcggctccctgcaactgccgcctcccgggtttaagctattctcctgccttagtctcccaagtaggtgcacaccaccatgcctggctaatttttatatttttagtagagacggggtttcaccatgttggccaggctggtcttgaactcctgacctcaagtgaactgcccacctcagcctcccaaagtggtgggattacaggtgagccaccgtgcccggccctcttccatctttttaataggtcatgactcctttcttatgaagtaacttataagcataatatatcttactttgttgatgtttctcatcagcgacctattagaaacccaccaaaagcctctacccctgaccaccttacttaaatttaactctcaaatgttggagacaactcattactagcattaatcatctcttctcagccctcagcctgtttgaaatgtctgctatttttggaagagtctcactactcttatagaatctaccttctccctttgcgttttgcttctttcaagacacaattccgtttgtccttgttgcagttacttattcctgtataagccaccacccaaaaatatagtgtcttaaaaaataatgttttatgtttctcatgattctttgggttgactgggtggaggttctgctgacttagcctggatttactcatgtatttgcattcagctgacaggttgattaagggatgggttcagttgagacagctgaaatggctagtcttttaagcccaggtttaacagtgtcatgatctgttaaacacgggtagtgttttaagacagtgaagatggaaacatcaaggcctcttcaggtctaaattttgtaatttccacagtgtcacttctgccacaatctgttggtcaaagtaagtaacaagactaactcagagtcaaaatgagaaagagacactacctctggacaggagaaacagcaagatcacatttcaaagaggtacctgtacttgggtgggaaaggtgtggatattaaacagtctactatatttcttattttgtgactcttagttatctcttcttagttttcttttttatccttcttttttttgagacagcctgtcgcccaggctagagtgcagtggcacaatctcggcccactgcaagctccgcctcctgggttaatgccattctcctgcctcagcctccccagtagctgagactacaggcgcccgccaccacgcctggctaattttttgtatttttagtagagacggggtttgaccgtgttagccaggatggtgtcgatctcctgacctcgtgatccgcccgcctcggcctctcaaagcattggaattacagccgtgagccaccgtgcccagccttttttatccttctttaaatgttttgtgttcctgttctcttaccagtttcataaggttttcaccaatatttataatcgtctccaaggatcaacacctggatctcctgtgggtgatccaaattaagatagtccaaaagagaattcataatccctatttctcaccccacatcttctcttcccttcctggatttatatcttgatccccggtccatggcattatctgtagttatgcaaactagattatttttgtaccttttcttacctcccatattcagttgctgataaagtcctgctgactataaatttggaacatctgccctctcgttttctacctcagagccattattcaggtttccattattctttgtattttaatactagtatttgagtaatttacagtgtttttgagttttgaatatttttggcaaaagtgaaatgaaatcagtttattttgtgaagtaaaaaagtgaaatgagtttattttgaaaaagtgaggaacatacatatggaaaaatgtaaaaggaattaaaaattacccatgagcctcactcagatgtacacagtattaagctttctgtgtacattcttttaggtttttaaatatgcatatctaatgtccaaatacatttacatttaaaaaacattttaagcatgttttttaaatgtgttaatgctataggtattgtttttatctgtttttttcaaattatataatcagcttcttttgatgcatagtattagaaattcttctaagacttaaaaagtgggacaaagaacagaattcagtgagatattgagaagatgtaaatatcaggctaaaaatcagcatctctaaaaattagagatggatacagcaaaatgtatgcacaacggaggacctctaatgtttaacatcagaggagaaatgtaattttagacaaagaattagtgagataaggtactttctggtttgtctttgttttcagtacattaactggaatttgtttcttgtctcgctcagttacctttctacctcacctcttttttaaattatccctttgttgttattagcatgccatttgtaatatttcctttaacttcttggacttaatgagctagcctctttgagttttcccctaacctcccatggttatccttctctcacaaggcattgttttctccttttttgcatgtttatgtttttagcagggctttatcttgcttttatttttttgaatataagtttgcctgcatgcgttcagggctattttatctttttgctctcattcaaattaaatcaaacccaataaatctacagacctgtgcagattcagggctgcttcctcttttattttttctttgggacaaaagacctccaaaacaatagcgagctgatacaattttctttgattgtggaaatctaatgtaactagtttacctaattccaattgatcctttctttagcctctgtttctgacagccactatgaacactcatgcgtcagttactttgctcatgctgttttctttacctggagtattgccttcttgtgcttcccttttctccccagcagagcctacttctctactgtgcagccatctttagccctcagtccttgatcaaagtaaccatctcttctctgcattcgccgcactctttggtgctccgcacttagttctttccttatttttacttattgtgaagaggtgtttgattgtaaccttcttggaggtagactgtgtattcacgtatgccagccatgttataggtttgcttaaaatgcttagcaaatttagtaaagatcatgattacactaagataatgttcacatagataaatacaactcagccggtttagtgattaaatgtagagcagctgttgtggagaattggtgagttgcttatttagtatgtttttcatgggagggatagcaacattgccttcaattgatggcaagtttcacgtgtcacaattaaagttttatgtacgtattttgaggctaaatatgaaattccaatactgatttagtcatctttaagaggcatttattcttgcctccctcccactttttattgatttgtttcaaagtaaaagcttttatttttaaatcaataacattcaggtaatatgattccataaagcctttccaaaaatttgagacctgtgtggtatcattgcgatggcactacatcagcagtatctgtagaacttgatattggagagttttgttcaaagaaatactttgtcttgataggacattaagtgaatgtagaggtatggctcagcataactgctaattacagtttcttttaaattatgaagtgccttttttccttttggcttttgccaaaatggaaaagagaaaaaaaaatcaatgactataaatactggaaaactctatgacaatatgatgaataatgaaataaaaattaaaaactaccaaagtcatacttgatagacttaaaatgacaaaagcaagggacattggaagtaaagattctcattgaatatttaactcacttatttctcccttggctgaacgtgtggagcggaattacctgttactagaatggtgatgaagtgttaaatgcattttggctttagtgttatcattgcttttgcttttttttttttaatttaatttaattttattattattatactttaagttttagggtacatgtgcacaatgtacaggttagttacatatgtatacatgtgccatgctggtgtgctgaacccagtaactcatcatttagcattaggtatatctcctaatgctatccctcccccctccccccaccccacaacagtccccgaagtgtgatgtaccccttcctgtgtccatgtgttctcattgttcaattcccacctatgagtgagaacttgcggtgtttggttttttgtccttgcgatagtttactgagaatgatgatttccaatttcatccatgtccctacagaggacatgaactcatcaatttttatagctgcatagtattccacggtgtatatgtgccacattttcttaatccagtctatcattgttggacatttgggttggttccaagtctttgctattgtgaataatgccgcaataaacatacgtgtgcatgtgtctttatagcagcatgatttatagtcctttgggtatatacccagtaatgggatggctgggtcaaatggtatttctagttctagatccctgaggaatcgccacactgacttccacaatggttgaactagtttacagtcccaccaacagtgtaaaaaagtgttcctatttctccacatcctctccagcacctgttgtttcctgactttttaatgattgccattctaactggtgtgagatggtatctcattgtggttttgatttgcatttctctgatggccagtgatggtgagcattttttcatgtgttttttggctgcataaatgtcttcttttgagaaatgtctgttcatgtccttctcccactttttgatggggttggttctttttttcttgtaaatttgtttgagttcattgtagattctggatattagccctttgtcagatgagtaggttgcaaaaattttctcccattttgtaggttgcctgttcactctgatggtagtttcttttgctgtgcagaagctctttagtttaattagatcccatttgtcaattttggcttttgttgccattgcttttggtgttttagacatgaagtccttgcccatgcctatgtcctgaatggtaatgcctaggttttcttctagggtttttatggttttaggtctaacgtttaagtctttaatccatcttgaattaatttttgtatgaggtgtcaggaagggatccagtttcagctttctacatatggctagccagttttcccagcaccatttattaaatagggaatcctttccccattgttgtttttgtcaggtttgtcaaagatcagatagttgtagatatacggccttatttctgagggctctgttctgttccattgatctatatctctgttttggtaccagcaccatgctgttttggttactgtagccttgtagtatagtttgaagtcaggtagcgtgatgcctccagctttgttcttttggcttaggattgacttggcgatgtgggctcttttttggttccatatgaactttgaagtagttttttccaattctgtgaagaaagtcattggtagcttgatggggatggcattgaatctataaattaccttgggcagtatggccattttcatgatattgattcttcctacccatgaacatggaatattcttccatttgtttgtatcctcttttatttcattgagcagtggtttgtagttctccttgaagaggtccatcacgtcccttgtaagttggattcctaggtattttattctaaaaatatggaatgcttaatgaatttgcgtgtcatccttgcgcaggggccatgctaatcttccctgtatcgttccaattttagtatatgtgctgctgaagcgagcactatgtttgcttttaaagttatcttcttaatgttgattttttttaaagactgttttgttctaaatgtctctgtaggtggtaatttgaaagtatggaattggtgtcttcagaaataatttcagactcaatctagttatagaaaaaagttgtttttgtgtttgacagttaacatacatcttgatttttttgtatatgtatgatttgataagccccttgtttctagcacatagtaatatggcttttttattaaagcaacatgtgctagcccctttgcagttatcacagtagtgtcgttccattttgattttgctgttcagcactttttaaaactgctgtatcggtttcttttgtagtaaaacttgaaataccagttcttggcgtcaaataatactttcttttaaaattgacttttagataaattaaaaatggttaagatgtagatagagaagcaaacgtgtgacttttttttttaagtagtagttggagggagcatatattcattccttctttcatgccacattaactgaatgcccattatgtgacagcttcttgatacactctggagctatactggtgactgagacatagccttttccctcaaagagcttctatctgccagtggagactgacaggtaaatagatcagtataatccaagctgacaggtgacataagcatgaacagaactgtggaagcactagagcaggatcagcacatcatgcctcggggaagcaggagacagcattatatatggtaattcaaaattaaatggaatcatgagcaaccctatattttaaagcagaaatatgattttcttagtgtaaattaagccttttttcaacttaaattttagttttgaatgagttgctgtcattcagaaattggcttttttctgtgttgtcagcatcgtgtgcctttttccacctcctcattcccctccatactccgaagaatgtctttaatgtttgaaccactatgtcacattgcatctcagatttaccttctctggctttggatgctcctgaatgggggtgattatttgcatttcctttgctcctcttggaggactgggtcacatttagtttaagggttactattagtgagcaaagagaacaaaggcaccaggagctgagaatgcccttttctaggtgactttttccctctatatctgacctaagttgtgcacttcttcagtaatcagagactataattacatgctaatgttatagccctgtcagtatctgtttctacaagatctttatgtattccaaggcatcctgtgtagggaagcatacaatatattgttaattttggacaacttaatccatcccaattctataggctgatgataagcttgaagatgacaaggccaggtgacagaatactggaggattagtttctgagtagttcaagattgtctttgttgattaaaacttcactgtgtatcagccactctgatttggacttttgttgaatatgaataaagataagaggattgagcaactcctataaagcaaagtgaaattgcaagcagtgtgtgaagaaaactggtttcactttaaccaaggacaacaggaaacaatacacacttgtgtacttttttgtgtctctgatgatatcagaccagctttctcttatcactgataaagccatgaccacagatgtaaatcaaatgacttaattgtaggtcgcttgtcaaacaaaaagcttttgttgcaaagcaatagcaaaactttgaaatgtgtatgtgtatacttagtcaatgtttagaatctattctttatttgaatatatacatattttccacattattattatagttttttattatgtgctatgcacagaattaagttcctctcagattcatatgttgaaccaccaacatgtctttataggtagggcttttaggaggtaattaaggttaaataaggttataagaatggcctcctaattcaataggttttgtggtcttataagaggaagagagacctatctctacctgtgaatatgcctaggaaaggccatgtgaggacacagtgggaagaaggcagtctgcaatccagtgagaaagccctcagcagattctgttgtttaagccacccagtctatgatactttgttatggcagcctaagctgaccaatacaccatgtaatgaacgtgctgttttcttatttctattgcatagttattttaggaattttaatattacaggctttttactgaaatgagacagttattttatgttgccttttgaaatgtgagcttgagaggattgcagggctaatgaggggctaggaaagaaaaatatccctagatttattcaaatttttcaaaaagatatgttatatattttgcaaatcaaaaattattagaaaagacaagatagttattatagaatttaaagtattttatttcatacattacaaatacaaaacatattgttttaagaattgctttggattgttttgaagcaaaatgttggatgtgatgtcctctgctcatgattgctgcagaaatacccaaatgacatagtaagattttcatgccttataaataagtcttgtatattcacagtctttctgttattcattgttgaacctttgtcttgaaataatgtaattcataagaaaagagataacttatttgcatatcataaattttagttcttttagcttgggtccaaatcaaaataaaattcattttgcttttattttgttgactagttttggaggatatatatcatcattgctcttaaatgttattatagttatttaatttgtttatttgctttaagataaaatataagtcttatcagagaccaaatccaacaactcaggttagaaatgtgaatacttaaatgaccattatccaagaaattcacaaaacctacttgttttccctcaattatgagaactaatgcattgtagagagtcactacccttttctttccctgacaacctccatctgtggtcacatatatgattgttgggacttctatagtaacaaaccctttgttttcattttctctatagattctctttttaaaaaccctattttctaacatcttactttgtaatagtagggaaagaaagcatcatgtatgtatggtcaacctattgtctcctgtctgttttagttagaatgcctagtcaaatgacttaatactttggattttttacttctacttagtacattttcattgaattggagacataagaaggaaaaaatgagactgagacaaacaggctgaaataattttaaaagtccacaaattttccatgaaaattgcttaacactgactagaaagtatcagtatcagtgatagtcattgagtggttttgctttatcctgcccacttagaaatagattgtcttctgataattgattatataaagatttgcgactgataactgatcaataattcaatatggctttaagatgaagttaaaataattgatatcttaccattgggactacacatgtagagaaccttagataagcaaggtttttacacccttattttcattttaatttaccttttcacaattttctgtgtggtttggtggtgaagaatacagattttagaatcaaagacttgtcccacaatagtggatgtgtagaatggttaaattactttatcagtctgagcttccatttccttatctgtaaattgtggttgtgtggtaggtttgtgtagatgttaatggaatcatgtaatcctttgaatcgtatatatgtaaacattacagtggcatataaaaaccatttaaaatggcatagatataataattatttcccacaacattgttaagaattcatcaagttctgtaagcaaaatatgaacctttagaagggacttaagtagtagagttggatttcacccacatcgttttctggatattttttcccaagcccttgtttggacaaatagtagagggaaatgtaaaatagaacaggaaaccttgattactgtgggtagtactgctgttgagccatatgactttgagaattcacttaggtaacaaaacagattgaattgtcaaagctgattcatatgaatcataggtattatctaacaccataatatcctaataattcaaaagatacaagcagaaaccaggcacaagtgtaatatttttttccagaggggtttgaatgtatcatagacagcttcaaaaaatgtccctttatccacatttgattagattttggttttggattaagagatgggctccagtgtatgctattttggttttggaactcttcagttttatactccattaatttcattaaaagaaaaattcttatgtgattatgtcatattctctagccatgccctcataaaattttaaattataggtttatttacaatagcagtctagaagacactaatatatcctgctcaaaacattttatataatagataggtccttcctagtaactttctctcaagtaaatgcaaaagtatcattgttagtattgtcaaagtgtggtcattattagtatcattattagtactgtcaaagtatgattaccaaaccagtatctggttaaagtatcattattaatattgtcaaagtgtgatcgccagaccagtagcatcaatatcataagggaacttattaaaaatacaaattattggttcctatgccaggcctactgattcagaaattttgaggatgagacatcagtcatgttttacaagctctccagttgattctgatgcaggctaaagtttgaaaaacaattgtaataactttataaagagatctggtggaggtcattcatttcttctagcattcttccctgcaatcccagggaagaagtgagttacacacctgacaataaccttttactttccaaacttaacctatttctttatatgtctgtagatatatttatatataaaaaatgttttacgactgattttaaaatgctgatggtaacaatataaacattatcaccaaaatcaccttgtagaaaaaaattgtagcagtgctgctttttcctaatgtactttgcaatttgtttcttttagaatttacttcaaggtaacttttaatccaaaataaaatgtgtcttactgctttgcagtgcaactgtttttcaccaagtttgacctcttaacacgcccaccagatttgactcttaatgattggctttctgaaaattaattgtatgtacattgctaatctacagacattagaaatattcttaaattgcttaaaggtagttttaagtatgaatttccaatttcctgcatttggaaattaattttaaaatcagtcttaaaacatcttgccttgagcaagatcagcatttttagaataagcttactttgaaattacacttttaaaaaatcagtaatattactttatagtcatatataataaagcataaatttggcccatctcactggtctctaccacagttctagaaataagaccaaaatttctcttttttaaagaatcttctaaaactcaacttagaactgaacaaataacatccttttcattctttgttatttaataaaaagaaatattccttcagatcattaacttgtaagattgaggaagaaaataagccacatttagatctcagtttccttctatatgacttggaattttttggttactaaaattggcttgctggaaatcttccctaattagagaaattgatggatgacaaagattaattatgttttatccagctattatatatccccttgtgaacttttggcacacacttcgcggccgagctttgccttatgactttgttttgtatccagaagcactctgccttttatgaacactgtaaaaagacctcaaaattggttttcagccaccttgccaaactaaaggccttgtactgatgaacctcttttgtttattttaattattgaagaactgtagagaaataattatctcaatcgttttgaaattttctaaatggtcctgtttgatttgggtctgatttgaatgaaatgtttgtttttaacactcagaacataaagatagcatgttgttggtatgcttgtaaccaggagttaaggaaccattttacctttattctcctttaaattcaagttattttaagtgttttgcttcatattaagtagaataattttagtgtagctactttatacatcttttatcagaaatgccaaaatactgcacacccacctcatgatcagatccaaaaaggtgaatatatataatacgtatatttgctgtactcagtgttatcctactaccattttaattaataaatttagattttagccggtgtgcttactaacggtaggtctgttaagatttatttgaccttaataagagtgagaacagggactataatgttgacttccctgtgtgaagtctttctggatgcttcttttagtgttgaaatcaacaaacttctatgtacattatttttaaaaatgcatatgcataatataagggtatacttaacataattatcaagtcatttaatggattgtagactcacaagtgggaattgcttttttcatttttagtattctaacaacatttgctagagggatactctgaatactagaatctattagaataaaagtgtttttcctaaaagtaagctttcttcaccaattttttcttagctactagcttttagtttataatgaaggattcttagtgcttatcttagtactttataacattactgaagctttaggataaacaacatatatcccatctcattactataaagtaattaattttctactaaactgtatgtcttctatgaataagattaattgaaaagcaaaaaaacaagctttcttagatttgatagatatttatgaaacatgacgttgtgaaatgtgtgcattttgttcctaaaagttgttgttttttcatgttgcattactacaagaagtaaaatccaaaaaatacctaccgcatgttaagcattgcaagacagataaagcccctgtaggtatgcagcttaccttttagagggagaagatagagaaaggtaaacaaataatttataagataattataggttcatcatgctaaaaaggaaacaagcaaagtaataatgtccttagatccaaaaggagggctacttctctggctccattttggcagtctaccagttacaccctccctacagttgaggagtttaaagtacctagaatatgtgcccatatacagtccatgctttctacctcagagtctgtagatcttcatatttcctgttccagcaaccctgagcccacttccatgccctgcccaagctaatgactgaagtctattgtctcaagggaagtccattgtctcaagggtggaccacaggaagggtggccaatatatttgaggaacacatggatgcagcttggaatatacaggaaggagagtctagagataccacatactaggctacatgaggagcataaaggaaccaggaatgggaagagagacaagtaggcttgcagtacaggacctggggagacttctcctatactgccatgttctagtgcagaagtcttgaagtgaatatttgactttccaggttattagggaggtatatttgtcaaagtaatggaaaagaagatgtcacatttaatgatttgttgacttgatatgtaagttttacatatttagacatgtgacattgggccccacaaaggctaatgacataatatatagaaatattaccttgtgagggtcactttagttaggatgatcagataaagtttctctgaggagacacgattcaagtcaagacctggaacatgaacttgtagaggaaaacaaataagttttaactggagggtattccagctagggtaactatgtcatacaaatgtatagaggatcaaaatcaacaataaccagatgcttcatctgcataaagaatcaaaagaggacctcagaggaaggaatgaaataacataaggatagagatctgcagggactagattatgccctattatgctatagataatagcttggtttttaatctaagagcaatggggcattactggagggatttaatgagagaatagcaggttcttaattacatctttttaaagaaaccacatcttttttcttatgtgtaaaatgtatgtaaagggaggatggaagcatgaaatcaggttaaaagactattatagtgacctgtggaaggaaatgatgtttgcttggtcttaactggtaggagtagagatagacagaaagtgtatgtgtcgagtgatgttttgcaagtagacctaacattttccctgatgcattgtatgtggagaatgaggcagggaaaataatcaagaatgattaagatttttggtttgagaacctggatgaatagtagttacatttactgaaatagagaatgctatgagagaaacacagttttttagggagataggaattgagagttctattgtgaacatggttagtctgaggtactattagacaatcaagtggagatttcaagtaggcacttggatacgtccaagttgaactcaggggaacaatgtggactctccttttgttttgtgaacataccacatgcttcttatgtctcagagccttagttccagttgtgccttttgtcggcagtattctttcctacctttgcctgctttcagtctcagcttaaatgccaatctatctaaatggttcccttatgtccatttttattctctatctcagtattgtttgtgttttggggtttttttgtaactttttttttttaatttgcaaacattttcactttttcttctcttcatgaagagggacattgtttcactcaccctatctagccaatgcctagcacagtgcctgtcacttgatagatattcagtaaatacttgttgattgaatgaatgaatgagcagttgtggtttgcttaaaaggaaagacaaggtgctaggagtagaacagtatgagagatgatggactcccctttcccccaaagatttgagggttcttgagtaagaggaagaatggttaatgtttattaagcacttattatatgttaggcactgactgagtactttattaagatctcatttaatatttagaaccaccctatatagtagcttctctttttatctttattttgcagataaggaagctgagactgaaagaggccatgttgctgaaagttacacagctagtgcaggacagccatatttcaagctcaagcagtttcgctccatagcctagtctcttaacaaatacatagaacagaagactatttctgcagtgctgtagatcattgtagtttccttagcctttgatgctattgaagaggattctgataaactcagtggaatagtacataatactcctcagatgcctcttcccagtgtcaggttccaacagcccaacaaaatgacaccactgtgtattccttgaagcctggacaaggttcactccttgcatatctcttcttcataagactaccaccctatgcagagtggaatggaaagaaaacgaaagaaagcagtggagagaggtccttgggagcaagatcctgattcacttcaactcacaggcaggtctccttttttctggtagccactggggacagtgccaagcccatctgatagagaccccttcttcataatggccagagtgtgtgagctacggaggacggtgggtagataccaaagaatgaaaggaaaaagccaggagtctcatcttttttgctctttgaagataaaggtaccgtctaatccccctttctttttcatattgtcactggataagaaactcctgagagcagaaactatattttgctttcattttgatgagcccctgtgcctttcacatcatgtttaagtctttaatccatcttgaattgatttttgtataaggtgtaaggaagggatccagtttcagctttctacatatggctagccagttttcccagcaccatttattaaatagggaatcctttccccattgcttgtttttctcaggtttgtcaaagatcagatagttgtagatatacggccttatttctgagggctctgttctgttccattgatctatatctctgttttggtaccagtaccatgctgttttggttactgtagctttgtagtatagtttgaagtcaggtagcgtgatgcctccagctttgttcttttggcttaggattgacttggcgatgtgggctctgttttggttccatatgaactttaaagtagttttttccaattctgtgaagaaagtcattggtagcttgatggggatggcattgaatctataaattaccttgggcagtatggccattttcatgatattgattcttcctacccatgaacatggaatgttcttccatttgtttgtatcctcttttatttccttgagcagtggtttgtagttctccttgaagaggtccatcacgtcccttgtaagttggattcctaggtattttattctctttggagcaattgtgaatgggagttcactcatgatttggctctctgtttgtctgttgttggtgtataagaatgcttgtgatttttgcacattgattttgtatcctgagactttgctgaagttgcctatcagcttaaggagattttgggctgagacaatggggttttctagatatacaatcatgtcgtctgcaaacagggacaatttgacttcctcttttcctaattgaataccctttatttccttctcctgcctaattgccctggccagaacttccaacactatgttgaataggagtggtgagagagggcatccctgtcttgtgccagttttcaaagggaatgcttctagtttttgcccattcagtatgatattggctgtgggtttgtcatagatagctcttattattttgaaatacatcccatcaatacctaatttattgagagtttttagcatgaagggttgttgaattttgtcaaaggcctttttgaacgtacatatttttctagctggctatttttagccactcagttgccagaacctgaaaagggtctgtatcagcattttttcacttattatcacctgcattgcttcctttggagggcataactgttggctctgagagttttttagtcaagaaaaatgagacattctaaagttgagatgaatgaaaatgagttagaaaatattcatatgtgtacagaaaattatacagccttttgttcagttaatactatcctataataaacaagtttattttataagtagggaaattacatagacatacattaaaaataagaaccaattaaaatcctttctagaatgataggataaaataaattatacacatacaagaactattttatgtagcttgcaaatataatgaaatattttctaaggtaataatgtgtgtgtttcctaaataagaaccatttgggaagaaagtacttttggattatttagaatgaatttatagaacatttaaacaaatactcggttactaaaagcttctcagatagattccagatgggcaactactttgcatacttttcaataagtttttttttttcctctaaagcaaccctgataactttaatgacaaagctgatcaaattctgaataattcttggattataaaaaggttctatggctgagactttgagtggaataaatgtgctgagccagctagggagataatgaagcaggctgactgaaaaattgtatataaaagaaaaatagagatagcaaatatttctcagtatgagtagtagaaaaatctctgagaatcatcttatgtattgtgacattttgttaattattctttcttttttgttgttgttgttgttgcctgagctggagtacagtggcccaatcttggctcactgcaacttccgcctcccgggttcaaggaattctcctgtctcagcctcccgagtagctgggattacaggcgcccgccaccatgcgtggctaatttttttgtatttttagtagaaacggggttttaccatgttggccaggctggtctcaaattcctgaccttgtgaactgcccacctcggcctcccaaagtgctgggattacaggcgtgagccaccacacccggctaattattctttctaaggattatatgttggtctttgtgcattagctccaaaataccatgttgtcaatatgtttagaaattcatctgctacaggtattaaatctttgtagtgagataatatttttttttaattctgatttaaattttgccttttttctttctttctttcaaactattacactggatgattaccactatccctttgaccaggggctggacaaagcttgtatttccagtattttttgtaattaagtcctcatgttgaacctgcaatacattggctcttgctgaggaatagattgtattactgtattagtgaattggcctgtatttaaggtagaattatttatcaaaaacaatgatttaaaaatgaaaatgttgaattaaaaatataacttcagtcacatggaagcaagaacttctatttcagttttgaatgttggggagatatataggaatagaataaggttgttctttactattagcagtattttcttttggtgggcattcttcttggagaactgtgaatcaaagggaagtgttaatttaagtcacacttctaatcactctgacttacctacttgagatcgaatttcaaatatgtccctgtgccccataaagccctttaaagggataactttaggaagaaatggcacaaccatccaaagagatttggcagcggttgattgacataataaataatgaccatctgtaccctgtagcagtccaccaagaagcacagttagtccctgcagcctgggcagactgctggttgtcttcagcaggtgaacaaaggagacgttgcttatttgatagttgttcactttatttaaaatgactacatttgtgaggcaaaattctaagatttaggttttagcattttaaaactaattagattttattttcagttatttttatagcttttgcttattactgtatctacttgtataaagatgtgggatttacatagtgttttcattaaaagtactatattaatgacaattttgttgaaaccttatttttaagtgattttatattttatagaaaatttggaacagagttattgtgggaaaatggaatatttgtcatttatctagtggaaataagtggtatagagaccgaagttgagtcattatttttttaggttacagattacataaagattatacaaaattgactcataactctgccagttatattgacatacttgattacaactgtaaagctttttgtgatttcattttttggcacaaaaactgtgaatgtgcaaaatgcaaagctttagattataatctaatgaatgcagtagatgaagagcaatctataattcatttgcatagaaataatttcaaacaaagtatgtaaatcataagttaaaaaatctgttaggaatagaacttgaaacttaaaatagaatttataacccattgtgtttcaattaattaaaattgattgcatcattatctctgaacttgaaagagtcatatgcattgctttaaataaattactctattttgggtaacagtataatttgttagaaaggacataagcttcagagtcagacatatatgggttcaaacattgtttctgccatttgctgtcagagtagcctgtctctcagaacctcagagtcctggcttgatggtgtcactaacacccccaagttcagtgatccactagaaaggctcacataagttaacattaagttatattcaaggctaggatttattgtcgcaaaagactgactcatgtaggaacagcaaaagctaggtcaaaagaggctttcttgccctatttatagcaggaattgtatggctaagtctttctgtctacaaactgcaaggccatgtgtgataccattactcaggaaatcccatttgagttttggagtccaaagttcttaccaggggctgatcacatacctgttaacatgaccagccatgtgaggaccccaaaccaggcaccatgtgcatagaatggatatttatgtttactttaagcatgctaacaacctagttcttcttgacctgccacttcagtcattatggactaatattactcagtaacttttgaacattctggtagtttagttctcattttcaccaaaggtggtcaagagtatagagataagcagaaactgaatgaaacagacctactttgttaaactttcctcacagagttattgtgaaagttaaggtagagctctgtttagttttggttttacctacgtccttttaggctttcttttttttttttttttcttcttacctttttttttttattattatactttaagttttagggtacatgtgcacaatgtgcaggttagttacatatgtatacatgtgccatgctggtgtgctgcacccactaactcgtcatctagcattaggtatatctcccaaggctttctttatctgaaaatgtctttattttctattcattgttctttttttttttttttttttttttttaattagagaaagagtcccactttgtttcccaagctggtttagatctcttggcctgaagcaatcctcctgcctcggcttcccaaagtgctagggtgagccactgtgcccagccttgttttccattcattcttgaaagatggttttaccacatttactatttacagttgacagttattttctttcaacactggaaggatactgtgctacttttgtccaaactgtgtggtttcagaagagaagtctgctttctgtgaattggtataccctgtaggtaaagtcatttctctctggctgctttcaagactccttgtctttccttgtcggaagtttgattatgatgaatcttggcttgaatttatttgtgtttatcctatttcaggtcctgtcagcttcttgtttgtagatttgtgtctttcgccaaatttgagaagtttcagtcattatttctttaagtactctttcagccctactctttctcctctccttttatctcagattatacaaatgtgggattgcttgccttacaggttcctaaggttctgttcattttttttcacccaatctattttctctttgttgttcaaattgggtaatctattgatctgtcctcaagttcaatgattagcctctcttatcttcactttactattgagcccattcagtgagtttttaaaatttgctttgtaatttttagttatatactttttatttggttctttttttaataacttctgtttctatggctgagataatctatgtgttttcatatttttcaagggaatttgtaagtgattgttgtgcatttttctggcagctttaaaatcctcgtcaggtaattccaacatcagatccatcccactgttggttgactgtcttttctcattcagattgtgattttcttggctcttgatatgatggatgatttttaattgtaccctagacatataatctattatgttaggacatcttgggtcccatttaaatctttcatttttgcaggtagttaccttgtttaggtttagcaggtagggcctggcctgctttaaatggtttcaatgacagtgcaatttttagagcttttttggtgttattttgttttgttggtttatctggtgccactgggcttccttctaacttgttcattttaatgctgcctctaggagtagagggaattccccaagtctgggctgccaggtgtttcactgaggaagggcatcttaggcctatgggattgtttggtagacttctcctgcctctgaggaacagagtacttcctgggctgggaccttattgtggtgggattctttctcccgttaggcacactgccctgtcatctctggcaagggagataggagtctcagtgcatggagacaaagagacttcccaggataggtcttttttttgtggcagtacttctcttgccaatgcaactgagctgccttgttatttctcagttgggaagtgagataacaggcccacagaaacaaagaggcctcttaggcttggtcgctcatttgtctgggatctatcttcctgttacttgtgggccatcccagtatttcttggtggggcaaagcagtcttaggccagctgggaaagggagtcttcccttagctgcttattgttagttggatctccagtcaatccccttgaaggtggtactgggctcatttggtcattttgaggactcttatataatccaggggaggaataggcctaactgagccgccttctatggctatgttgggagtcaaactgccttctgttgtggcggtaggatggaagacatcctgccactattctgttctcccattccaggagtcccaaaccaattcacccttctcataccatctttcagagttccttgtttgcctcttgaattatgtccagggtttatagctataatactttcctgtggaaaggagcagggagaattatgcttctagaacttgtccaatgaccatagtattttaattgtttgtttggatgctggataatatacattctatatttgtatagtagaacaaatgctcacatttttaaaaaaaaattaaagggttacacaataaagagtatttggagacttctggtctataagattaagtgaatacttgattccttgtttaagctctccatggcctggttagaaagtacatttctagtttttcactgaacattactcccctttaagaagtctttgccttcactcttcttgtgtattcactctatctagaagatttctacttctttctatgcttttgccaaagttattttctccttttagcatatcaatcatatccatgttcaagacttatctcaaatactacctgttttttgagacttcttctgacttttctagcacaatatggcttccttttcctctgaaatcctttgtcatcacttacattactcatgtgacacttgaaatgacattttgaacagagtgtaatctaagtttatctttaactcatctgtttggagatgaactttcctagagaagcagtgctagcaatgcttaagtatatccataacatatgcaatgtatggagcataactaccattttacatgagtctaatggaatatatccttatatactgacagttctatcttaaaattccaggttcatattcctagacttacaccccttctctaccagcgtagttaatactgagtcccataggagtggtggcttctgtgggctatgccagagagactgctgcatggcagactgagagaaagtttgttggcagcgaagtagaaaaataaactctttagagatgttagagagaagagagctaatgttggtgggactgtgacaaccactaatcataggttagaaaagaaactatgtttcttttacacaggtattcttgcccaactcctacccttcactgaacacacttacatttcctccctgtgcctcattttttcactcaacaggtaatagcttaccttattggttgcccccagtttcctgtattacatctctttttccttctgttccttgtgcttctcaaattaactactacttgcatttgaatccttgtctcagggtctgcttctgagagaacccaaactaagacagggacagtcagctacctcacatccacaagttattagaactagattcagtagcatcagccaactccccagaagggcagttaatccatctcattcatttcttcttttctcagtgtcactcacgaatcaattaataaaaataagtattatttgcttaggcaattagaaggtacactgtgatttcatgggtttataaggccaccaaaatctttatatgtagcccatatcttacagtgattaccaaagtgcataatttatatctccagaatctctctaaaataagagaattgataaataggaaaagtggatatttttcttttaccgtaatcatgatatattaatactcaggaattaacataaagaatagaatccaaatattaacaagtcaggagtctaagtcaatctgttgtagcttcaagatcagggaaatttaaccattagttttgaacacaggtctgtagatttttctgtatggtcacagatcacttgcaagcaaatgaaatgttaaatataactctgtcaactctattcattcctattgtaatacatcttttatgtctttgccttgtttctattgatggtttatacttaattacaacttttattttcattcattaacctgtggactgataaagctactattcctatttcttggaagagactaagaggcagtctgcttccattttttctgttttttctctatatttgagaaggttgcaaaaagtctgcttgtccctttacaaaaaacagagcaaagatagagaccagaaatatgtagtataatcactttaggagaaaccagctctggagcagttgttaaggagcaagctgcagctgtctttggccatatcttctgagtgtgacttttctttcctttggatagaaggggagaaggagaaaagtcagtaaaaataaaagcaaatgcagagttccaggcttcttcagcaactccccattctccaactctgcgttactcaatgtccatgttccctaatttacttttgacttgccctctgaaaccatttcagaggcgtaagtaaagctttagcatcatcatataactgaaattgaatgtctttctcagccacttagcagccttcttaggaatattccatttaatacctaagggggagagggttggtagttctaccccatctttatccaatttaacggattgggagtttgcctctctatcaacacttctgcagactatccacaaattctgatcaaaatagtcactgaattctcctggggcatttatccctgcctcttacaggctgagtcacatgtctttttttattatttaaatttttacttttaattaacaaataataattgtatatatttatgggtatgagtacaatgtgatgttttgatatatgtatatattgtggaatgattatatcaagctaactaacatatccatcacttcacataacttatttttggtagtgagatcatttaaaatctggagctttttgtagcaattttgaagtagaaatacattattattaaccatggtcactttgctgtgcaatagatcttggaaacttactcctcccatctaactgagactttgtaccatttggtcaacttatctccattcctcaacccctcacacctcctgtttctgctgaccaacattctgttctctactgttcttttgtttttttctgtctataacttagactggataatttctgtagatctattgatcaattatctaaggacactgaaattcaactttgatatgacaggcagtgagccggtttggtctgcagacttagtctgccaatccctaatttggttcaatccatgatggacatgtttagaaggtaggcttacttcttttcatttcgaggttactttttctaccacagtgtggtatgtttggggtttattaaaagcctggggtattttatcagagcctcttctgcttgcaggccctgaactctctctgtattttttaacctattggcttctgctttcacaatgaccatgtgcattcaagggtaaaagtagcccataaatccttgacatggcttcttttcttaacctagctttagtctgtcaatacttcactattttactagctctccagtgcctttaaatggatgtttaggggttttctttgtttggttgttttttctttttgtgtttttgtttctacatttcaacctattttttcagtggtttgcactacaaggattgggctcaactgcctaggttatcattgtctaaagtggaaaagctgtccaagaatcagtttgcaactttaaaataactttcctgactgccagatggcactcttagaagaataacatttgcttatatatagggtttggggtggagaattaaaccccagaactgctaatcaaatggaaagtacagctcttttattttttattaaaaaatgaactttatggatgtgtaatttatataaaataaaattttccacaggttttaaatatatagttcaatgaaacaccaagaaattgaacttttttttttttttttttttttactgagtctcgctctgtcatcaggctggagtgcagtggcgcaatcttggctcactgcaacctctgcttcccgggttcaagcgattctcctgcctcagcttcccaaataggtaggactgcaagtgtgcgccaccacacccagctaatttttgtattttagtagagatggggtttcaccattttggccaggagttgaacatttttataaccccccgcaaagttgcttctttcccttttgcagtcagtctttctcaactcctaccccaagcaaccacttctctgatacctagcattatagattgtccttctctagaattttatgtaaatggaattagtatctatgtatgtaaagtttgtctagatttattaactcagcaaagtgatttgcaagtgctctgttgtatgcatctgtagtaagttcctttttattgccgaatagtcagttccctgaatgtaccaaaatgtgtttatcagttttctttttgatggacatatgagttgtttctagtttttggctattacaaatagagctgcttccagcattttttgatgaatctttttgtggatatgttttcatttatctttggttaattcctaggagagcaatttgagtcataggatgtgtatgtttaactttatgagaaacttccaaattattttcccaaacgcaaaaatgctttttctgcgttgggaaaaaaatgcttttgcattttcaccagcgatacataaggattacagttgctccacaccctcacaatctcttgatttgttaatctttttaattttagtatcttaatgggtacgaagtaatgaagtatcgtcttattgtgatttgtatttgtatatcactggtgactaatgatgttaagtgtctctgatgttcttactggctatttgttcatcatcttttctgaacttgttttacacaatttcttgagctgggttctttgttttgttgttgagatacgagttttgtatatgttcttcatacaaatgctttatcagatagaaattcagtattgcaaaaatgttctcccaggttgtagtttgtcttttcattttttaagtgatgcttttgaataaatgttttcaattttgatgaggtccaattttcatttcttttttatagttagtgtttttttgtgcttctctaagaaaccttcacttacccacttgatcatgacgttatcctcctaagttttcttccaggatctttatagcattaactttatatttaggtgaaaaaactatgcataaaaactattgcattttaaaaatcagtgttgtccctttgttgacctaacagagagtgttggttgagtgtttgccacatggtatttcagaaggtaaagcacttcaaataactgtccaggacattttaaagtcatagttagggtgaatttttacttcaagatgtctgattacttgttacaactcatagatcatcattacatttccatctgtctttgtaatgaggggaaaactacactctaacattaataagaaacctaactcataaataaaatatatcaaccaggatactcttcctccaactcttccttcctactcccctcctttttttcttcccttcctctctttctttcctttttattcctcccttccttttctcttacttttttcctttttcctttcttcattaaaaaccatattttttcttacattatggtattgtgggatttcatagttgagccttttttagatgataaaatatcctctagtaatcagttcttgagatcagataatgggatgctctctttcaatgatatgtttgcatcactggccttatgcaccctagtgatattgtaattggtgtttgttgctttattataccacaggagattacttgggaaagatatgggactatatgaagtgtcatagacagctataactcatggcccatttatatgtggaaaaattagctcttagtaatatgatttgagtagaaaaacaatttctaagattaaatgagaactgaaaattttacattgtaaaatcaaactccctcatgtatttatgacagctttttgaaatgacaaataatagcataacataaactttatggttggtggaaagtacatgctgtgctctaattacagagatactatcatttcgaaggctgagatttctgatagaatttggctgtaatgtagactttaatgtcctattgtgtagtaccgtttcttaaatttgttttacagcatcttggggttataacttctcagtgtgctgttgattgaatggtctgaatgaaatatccctttaggtcgactttccactggctcaaatgcaacttcaagaagtgtacccttgcttgtactaaacaactgttcttattctttgctgtaggacaagaaatggattctcagtcatgaagatgtcatattgggagaattactgggcaaggtatgtaatcaactgagctaaataaccagaagtctctatattgattgtgaagactgcagattttttcattttcctcaaagcttttcttatattgccacaaggcacattacacattaactagaacacaatgctatatcttctcaatattgtgatgctcactgaaatagatgtgtgaaagtctttgaaagatttaaggatgattcttaacatttaagaatattatatgtgtgttttcccctggaaggactaaaaatcataatgattttacttcagtgtgcagtaaagtcaaaactagtgaactgagatttgaaaagaaacagtgagataataaaagtttaaataaatacctaatagtcttgttctttttgtttctggttacatgtgatagtttagaaaaaaatgaaatactgcctcttgggatttcaggattgtatatagaattacagtatgtaacaacactgggcatatttcaatctaaaaatgtggacaagacacttgtttcaatataaatattaattttataactagttctattaatcagaaaaagcaactatatataataaaagtcccttttcttccaatgtagttggaagtttctttgaactcataggccgtagtcaagtatatgttatttaacaataatggcagatacttgagaattaaccaaatggactatttgaaaatttattaataacttttatttataattgagttccaatgaataagtattcacttttttgtcagtgacttaattagtgattatttccattaatatataaaaatgtgaattcattttagcttatggtgtgatacaaaaaatagtttaaaatctatatatttaggaaaagctaacatacatatgagtgatcagtactgaacttaattaaggctcagcattttagatgaagaaatgattactcattacttttttgattcaaatgtaaacttgatgaattgactattttcccctatttttaaaaaatctctgagaaagtaaatctctgttgaaataacatagtttgcaggattcttatcatttatgattttaaaatacttttcccaaagcatcgaattgttattggaaagcagatttttattggcatatttagtaagtgaattctaaagaacctcaagctaaaagcagtgactcatatgttatttcctctgggtttatttcctcatccttaaggaaatatttcttctttcccttgctctaggtaactcagtagcagtgactgggccaaaaaatattacaaagattaatttccatgatacaattaaataataaattataaaactaaagcatttactgaaataaaggcagaatatgtttagaaggacagactttttagtactacgaaaaaaatatttttagttaaagagaaatatttctatttttgtgtttagtttatgctataaagtattaggaggaatttatctccttagactatttcaaagaataatttttttctcaacgacaagtaatatgtcagtcttaatgaatttattttaaatagaagactgtgactttgaggcagtgtgtagcttaatttcatccagtagttttaagtacaagaaaatggttatttaacatttttcactgcctattttaaataatcatttacagtatactgcttaagagtacatggctaattaagacaattagccatgattcctattgttagagactttggagttaagttataatataaggtaatggcaggaacgctgagggtttttttttttgtattcagcactatatttttagtagactgtacttgatatacagtatcagatgcagctatagtcgatagttggtattcaacaaatattcagtcatccagtgttttttgaatgcctactatgtgcaaggcactcttctaggcatgttttacagtttcaatgagcaagtagccagaaatcctttctcttacggagcttaatattctttctaggaggagaagataaacaataagcataataaataggtaaattttataatgttagagggtgctaagtcctgtgaacaatagagggattggaagcgttactagttgtagttgctgtttttagtaggaaatccagataaaccttattatgtttacttttgaataaagacttgaaggaggtgggaaatatagccacatggacatctgagggaagaggggtctatgcagagtaaacagccaatgcaaaatttgtttgaagagcaaaggaagcattttcattgtaacagtaagcaagagggaatgtgataggagaggaagtctgttaggtgatgagggtataaattacattgaccttttaagtcattgtataactttggctttgatcatgaatgaaatggcgagctggtgggcaattttgagaggaggaatggcatgatcttttttaaaaagttactccgggagttgtgaaaataggctgacaacttggaaggttaggaggcagttgaacttacctgactaaaagatgatgctaggttaagatgatagcagtggtggtggtgtgaagtagtgagttctggatgtacttttgaaattgaaccaattgaatatcctgatggactctgtatgtggggtattagagaaagatttcagtcctaagtgtaaaagatttcagggaacgagaagaggtgttcagttttggatgtattgagtttttctatgaaacttccaagtggggatgatggaaactattgggtattaagtctggagttggagaaaagaggtctgagtcaaaagtacaaatctggtagttgttagtatatagctggtacttaccacaattaggtggattcaacagtggagtgagtctagatgaagaagagaagaggatcaaggattgagccttgcccactcgaacattaagaggtggagataagagaagcaatccccaaagaaggttgaaaagagcagccaagtaggaggcagaaaaccaggagatatgatgccttggaagacaagaagagaaagtatataccaaggaagagagtgatcagtggtgtcagatgatgctgaaaagccaaacaagatgggatttagcaatgagaggatcactgatgacttggctgagcagtttccttggaatgctttaggtgaaagccagtttggaatggatttgagaggaacgggaggagagaattagcgatagcaaagatgtaattctttgaagttttgctgcaaaagaaatcagagatgtggggtgatagtttcaagagaatgatttgtgctttgtcactgttactgtttaacttgagaaaaataatagcatactagtttgcagttgggaatgatctagtgaaaattcatcatttaagagagagggatgaacattgctagagcgtcatccttgagcaggtaagaggggatgcaatttagttcacaatggaggattgactttaatagaaacacagtagttcactttttataacagcgaggaaaattggtaggtgggtcaatatagggacaagagcccagagttctctttatattgcttcaattcttgaaatgaagtaggaaacaaaagcatcagctaagaatgaggatgggagatttgagaagagaatagaagagaagcagtcatccagaaaactgggagtgtgaatggtctaaagaaatataatatgattattgagtagcattaagggccccctaagggtttgtgttcatgaatttaaagttaaatcagtcagcatgattatggtttttctccagccatattagctttataggtgcagaataggcagagttttggatttaatcagacttgtagatttgctaagggagttttacagattaacagaggagcaaataaactgagagtgtatgggaaggcagttataattattgaccatggaatttaaggtggaacacagaaggaggagaatataataaaagaatgacgtaaaaagtgatagaaccgaaagattggcagttcctataaagtcaaaggacttttgaagtctggataagtattcaaaaaaaaaaagaggaagtaagctagaaagatagaagccaaccggaagttgaaatgaatgagatagatgttatacaacatttgcattattggtatggcagagtttaaagtatgaccctagaaaatagcttggagtgcaaggtaattggaggagagatgttcaagaaactgagagtttgaattgttggaaggtcctttaaatgtctattgaaattacaaagaattaggacactgggtagactgacagttacccaacagctcaaattgccaataaacaaaatattttcaaattcagtaaatgacagctggagtgaggaatagtgggtaatataattgagtgacaaattttcaaagctgagagtttcaggaatgtgggagagataatggtttaaagccagtgataagtaggtaatagaacactgtgttctatctgcagggcattagtaggattatatgtggggaaaataagtcatcacttaagtttagatggcaaaaggaagttcatccaccatttgggtcttctcaagtgagagccaggattttgttagaacaggaagttaaaggaaatgatcaaagaatagattgaaaatataattttgatgatgatgggccatgaattccagaaggcactatgcaagtcggagatagatgagaaagaaggatcaaatagaagtatgctgaatctgagggggctggagagggagaaatgaagattaaccgaggaccagggtcatcttacattgactgacataaacacagtcaaggggcataagatttgtcctcagggactgaagggcagcagcagagatgaagtcatgcttcatgactttttgtctcaccccttgcatcttagaaaggttaccctgattcagaatctcaattctgtcacctaagctgatcttatattcagtccctcacctcccctttaaagcaaaggtttgcgttgaatgatgattgaatgatacagagtgatgagtgtcctgagcttcctcctcacctctttggatagagaagaggtggtctgggaaagcatagtcatttctcagtgtctgaagactgtccccctgaccaccgttgataaagttgacattctctggatagtggttgctaaattaatgtttaaatttttcaaatgcctagtacatgccagtacctcttaaaatagggcagaaaccattagaaagacacaaagggcaatggggataatatgtattcagggacaggaaaatcaattttgggaaaatcaagaaagtcttcatgaacaaggggcataagaaatggatttaaagacgaagtatcagcttctgattggaggtgggcgttttccacagagggaaaaatgtagaaaaggcatgacacgtatttagggatcactatgtatttgagttcagagtacatgtaacagttgggggttataatgtggagctatatagaggccaagaaagtgatagtaattgaaggatggatattgagcaaagcagtagtataatcaaagttttctctaggaaagattaatttggcagtgctgttgtaggtggattggagaagtgagggactgaagatgagatcagcttaggtaatagaattgaggtcatgaatcagggtaacctttctgagatgcaaggaataagacaaaaagtattatggaggtagggtctgaatgcttacaaggcaaatgatggttctagtaaccgaaaaaagtaatatagccaggaagaatcttttgattaataaaacagtaagttttagacaagctgaatcgtaagtgctttaggtaagtggaggcccagcagtaatcatgtaaattaatatcttctctcagctctacctctgatgtaataaataatctgacaattgtgggtaaaagacaatctcttgagaataacagatgtgaagctcaaattttccttttttaaatttatcacgaatgtttactgtttaagtatattttttatgaaaacatgattgatcattgttttataaatatttgagttgactattagattaaatggtaaaaattgaatataagacttgttaaaaatattttaaggtattttaataattttatttattaataagccgtagttcaaggtacaaattttaacttgtgaacttcaaatattaagagttacattcatcttagtgctctaaaactcagtaagcaaagtaggcttctagtttagttacttcttgctcaacaatagcattaaagtttattataaaatgtttgcatatgccaggtgtggtggctcacacctataatcccagcattttggaaggccaaggcaggcggatcacgaggtcaagagatcgagaccatcctggccaacatgctgaaaccccatctctactaaaaatacaaaaattagctgggtgtggtggtgtgcgcctgtagtcccagctactcgggaggctgagacaggagaattgcttgaacctgggaggcggaggttgcagtgagccgagattgtgctgctgcactccagactggcaacagagtgagactctgtctcagaaaaaaaaagaaaaaaaagtttgcataatatgattatagctatgtaaaaaatacatatgcagtgtaaaaaaacctaagagaatactcaagaatagctgttgtgctagtgtgttagtcttgtttatcttctcggtaatgttttggatttaattttaaaaaatagatttcaaaatgtcatctcttctaaaataaatacactataaatcaggcctttttttttttttggagacagagtcttgctctgttgcccaggctggagtgcagtggcgcaatctctgttcactgcaagccctgcctcccgggttcatgccattctcctgcctcagcctcccaagtagctgggactacaggcgcccgccaccatgctcagctaattttttggtatttttttagtagagacggggtttcactgtgttagcaaggatggtctcgatctcctgacctcgtgatctgcccacctcagcctcccaaagtgctgggattacaggcatgagccaccacgcctggccaaatgaggcattttataccacaatatgtcctagccatagagtaaagttagaagttcgtatgtctgatagaaattagttcatcactggtgatattgacatgtaggtaagcacctcctcctctttggtacctttccttgtatttggcaaagatatacatgctgtcatttaccccagacaatgaatgtatttctattttcagggaaattttggtgaagtatataagggcacattaaaggataaaacttctgttgctgttaaaacatgtaaagaagatcttcctcaggaattgaaaataaaatttttacaagaagccaagtgagttatttaaagtaatcaaaatatgtatttattatgtaaattatttattaaaatgtaagtttgaagacatcttaaattgtgatttactgaaatagtaggggtaagcacttttacagtatggaatccaaaaatttgtgcttttgtgatattctgcagatcaattcagcaatcatagtcaaaccaggtgttaaaaagcagtattattcaagttcttaaaatgttaagatattttgctttcatcacacatacatatacatatatgtatatatgcaatactgtgcttatgataaaaatattaatgtattatatacatatactgtacagctcacatatacatttaagtagataattacatctgtcctaccctccttagatagtactgcttgcttctgttttctcagctgttaggtttcatttctgagaacctcagatttcttcttcaactgtataacttacatatacatttaagtatatacatttaagtatatacattatatacattatatatatacattatatacctttttatagctatccttggtttagttgtacatgtacaaaacatgcataaattttttatctttctccaaagttacctttttcattctcttaggaaagtatacagcagttttcaaagatgagtgaatttataactgttgataagataataaagaataagatttggtaatagaaataattgggacagacaggcatttgaggtaatctagtttatttttagttcatgtttagagtcctataggtgagtgcattatcaagtagaaggggctcactgcccaatgtgctagaagccaatactgtgacaccaggtctttgagaaaagaaaagcttactattaaacgtcaactcttaatgatttcaaagcaatagttttattagaaaaggttgagggggtagattctgaaattactaagtgattggtggaaggggaaatgggaggcctggaaagtccttggccacacacagttatctcttcatgcaatctcatggttcatatgtgcaaatccagggggagttagtctgaaccatgcagtggaaattcaggctgtgatgttagcaagcttgtttctgcacagatgccagtcagccctatttgttctaaccaatttcagccagttcttttataaacaacgggagtttcagtgattaagcaagttgtttctttttttacgtgctatcctgcaaactcaagaatttttgttggttattactgtgttgaggttttttttcttaactctttagggacatggtttcaagtctatcctactttcatagccctctgatgaaattttgcctttatccaaacaaagtctactctgcttcagctgaagtctctgttgaaactccattattcaattatccatttgccaactttctcagaacttttgtttctaccattttgaaattgaccctgatcaagaaagtatttaactattacaaaatccaatgaaatggttaccctgtagcatttgccagtataaaatgatttcctattttatgtattttaaaatcaagtgcgtgtgttaaaaaatatatatatatatatgcgctaccctagcagcttacaatttttggcccactaatacttttcagctatacttttgtggtagtggctaaaaccagatattataatttgaagggagttgtacatgttttagattaactagtttttaacatggttgttaatcattcagagtagataataatttttaaaagaatattaaattaaggagaattgactcatttgcatccacattatgttgccaatatgtatcagtatggttgggcctctgtctccatgggttctgtatctgtggatttgatcagccacagaacaaaaatattagtgggggaaaatgttgatgattgcatctgtacagaacatgtacagaattttttttcttattattccctaaacaatacagtataacaactatttatataacatttacattatattaggtcttataagtaatctggagatggtttaaagtatataagagggtgcgtgtaggttgtatgcaaatattgcaccattttgtgtaagagactttaacatgcatagatttctgtatccacgggggtcctggaaccagtctcctacagatactgagggaaggctttactcgtttgtatacatccaatttatcataatttggggtcatactgaaattttaaaaattgaattatgattcaagagtattctagttgtaaaccctatttgtgatcacaaattaatgctttattattcaaatgataactattcgtatattttcatctcatctagaattctcaagcaatatgatcatcccaatattgtcaaacttataggagtttgcacacaaagacagcctgtctacatcattatggaactggtttcaggtaatgtgatctgagaatttttgcatgatgacattttaatgtcatgttttattgtttttatatgttcgatctctttgatttctcctcgtaaagtctccaaggattttgtttaacatttccagataacaaaagagtctgtacctatagtcagtatttttataggctgtaacactttactattttctagaaaatgtcaactgcttttttaaaaggcagatttattattagaatatagttacacatggaattcagttatacatctttatgtgcaaaacactatttagaaaaaggcagtgtacttagactttctaacagtgatagtactatcttatatttagttcactgtatatcattttccaagtacatctccacacaacctctcttctaaatgtttaaattaatttttaatttttttttgtagaaatggagtctcactatattgctcaggctggtcttgaacttctgggctcatgtgattctcctgccttggcctcccaaagtgctgggattacagacatgagccgcagcaccctgcaaaacctcttttttgatggttatatataataatctcacaatgctttgaatcactttcgaattatgaacttctttcatatgtggacaaacaaaaaggtgatcagtctatgaatatgtcttggtatttatttctggtgactttcaacacctttatgttaacaacttttgacaacaaagaaaactttgaagtgctgtattaatagtatgttttaaagtttttttcgttgtccaacttcctgttgtagaagatacattcagaagtaaaatttgatctcataagctttacaaatagagtatttaataagtgaaagggatttgctttacttttaacaattatttactcattttaggagaaatttaaagaaatatgtaaaacgtttctaattttaattaaaatatattaagtaaacataatattgtagactgctcattaatttctgtttacagaaattaatttttcatgatttataattattggtcctgttttgttatactgctttgcttgctattgaaatatttctcaatattaccatgtaactgcagaatacctagatcattatcatctttatcctcattaagatggcattgtctgtgttaagtacattgtatgttttaatggtttaaatgtgtaaatattataaaaatacatattaacatttacatgggtacaaatgaagcccctgaataataaggaacgccactgaaaaactcagatttgggaggtgggatgaacttgaggaaaggtgattctggtcttactgtaattgttaaaggaccacagatgcaaataccagatgacaagtcctagttaaataaaacaaaagaagatagctttgtagaggagccaagcaagtgtttatctagactctgactagtaacctgtttatattttttaaatgaataagaataataaacttcattagaaaattgaaaatataataaaaggtagaaaattgaaaatgaaaccttctactcaacagtctaattatatctcaaagctaattgctgcttgcagtttttaaatttttttccagaaaaatgtttaatgcagatgctttaaatttaattatgaaacaaattatactccaccactgtttcagatcttgctttttttttcttattactataatgtgtgatggttttactgttttgcagttatctatacaattctactttttttggtaatggctacagaatattccattttgtggatttacataatttattcaaccgcaactttatttgtggatagtttggtcatttttatttttattatttgtttttacaaacagtgttcaatgaatatccttggactcactgtaagaatcatttggaagtgtgtctgtaggtaaaaattcagtagtgagattgttggatccgagtttctgtgtattttgatttatgtaaatgtattagcttttgattgctgcacaagtaattatcacaacctgagggcttaaagtgacacccattttttacctgacagggtctgtaggttagaattcctggcagccttgactgtgttccgtgctcagggtctcacaaagccaaaatcaggatgtcaggctgagctgttatctggaggctctggggaagaatctgctaccaagctcattcagttgctggcagaatcatgtcccttgcagctatatgtctaaagttcctgtttctttgccttctgtctgccaggggcatctcttagctccttgaggttgcctgcatcccttttcacatcgtctttctatcttcaaagtcagcacgggcctgctaaatccttcaagtattttgaatttttctaactttctcttacgttactagctaaagaatactctctacttttttttttaaaatgctaaattaaaactattgaataaagaacactctccagaacacatgatctgatggacaaggtctacattacatgcagtgaagctgaacatgaccatagtttaacatggaatgtcaaacaaattagtaattttcattgtacaaaactgtttatgtagctgacatgcaagtagaaaagtgtcatactcagcattttcaccagtcgtctgtgatgagttttaaaaaaggcatttggagaaactggtagatgtcttcagcatatagttcaaataaattagttatatgtgtactactgaatcctctttcaacctctcttgcattccaaatgaaatcttagtgcaaacatcaaagttgctggtcactccaaaagactgttaaactcagaatacaagttctgaattactgtgtattaagtagggcaaacccaagaataccagttactgcaaaattcatttaggcacgtttaatagtccactccactctaagcattttttctaagtctctcacattaatgactaaagcctgtttacagtactaaaattctgtcattcaagcatcagtgattacatttcagagaaaggaaattcatttcagtaatagcattactgctatatcctaaaaaaaagagagaaaataaagaatcataattaacaaaactagtatccgtaataggatacacggggaaaaacattttaggagaaaaaaaaaagtgtgttttacttgccacagcaggaattatataatgtaaacaccgtattggcccacaccacaaaaatccatgagaaaggttcaaatttgaacactgtatgtgcattattttcaaatctgtgtttgtgagtttgtactgtatctgcttgtaccaatacatgacaaacaaaacaaacttccacacacatacaagtgactgttaaatattaagcatggcttgattccctgactctagctcaaaagaaaaaaaatgttaagtgacatcccaactgtcttaaaaatgtttacagaaaccattaaatgaatgtgagtagtagctgaggaatgatgaaaaagtgatggtaatgatatggtgcaagtggatggaaaaaatatatgtataatgctgagattttcaaatgcatggaaaatcttattctgtgggccttgtctgaattttaaactgataccaagaataaaaaaatatagtagcacaagtccattgacacctggagggtcaggcctagaaagctaaccttcaaagtgcaaattttaacaatggaatgttttagcagggacttaaggacaatcctctgtctttttcttgttgaaaagacctaagatgttcaggaagtatttattcctggccagaattatttcagtttcttggtaaaacaaaaatatttagccacaattaccacccactcattcacatacccagaaccattcttaggggtgtttgctgggagaaaaagccctaatctatgtatcatgtaatggaactcttatttataatctaagttttttgaatccactactttaaataccaatatgcacctctcttatcccctccctctccacccatctaccccatacacccccagtgaacctaggtattctaatgtctttgtgttttctaagcctcatgaataagactgttgaataccacctccaccggatcaaaattaacacctggtgcactttctacagcaccttttttcttctccacaagtgagaggaatcttgatactttcaagcctgtatctagatctccaggtcatcaggctgaggcctgctgctggcacgactgctggctctgcttgaaggttgctggtccacaatggctagtggctgtagttcatgtccagcagctagttttttagaattctggttatcatcggggaaatcaaaaggctgtgcgtgggagttagagatggtgcttcccgcctgccccattcgattttgttctgcactgtaattagcccagttttgctcacttgcttgcttgtcgtaattgcggcaagaagaattgtttctgtcgccattaaccagcttgtacccaggaagagacataggcgagaggggagcagttggtgaggagcagccattgaaataagcatatttttgagacccacagtctttggcggggctcagcgggccagtggtcgcatggtaagggtcgctctttcccttaacccaatccttaacgcccttgaagaaaacgtagaagagttcaatgatattcaaggccagggacaccaaggacaccaccagcatgaagatgatgaagatggttttctccatggggcaagagaggaagcagtccacctgatgtgggcagggatctcttttgcaagtgtgaacagcactcaagctgaatccatagatgtaccactggatcagcaaggtcacctcaaagatagacttgaagaggatactgatgatgtaggttcgcagcaaccccccttgcattttcaccttaccatgctcttcaataccatacttgaacttctttatctcaatctgcttcaagtgcatctccacattgacaccatcagtttgggcaaccttgagttcctcctctttcttgttcagtttctcttccttttgcatcacatagaacacatgagccaggtacaagagtatgggtacagacacaaatatgatctgcaggacccagaagcgcacatgagagattgggaaagacttgtcatagcagacattttcacaaccaggttgctgagtgttacaacgaaaggcagactgctcatctccccaggctgactcaaccactgtcttcagcagcaggatttggaaaatgaaaagtactgacagccacaccttccctccagcagttaagtaggcttgaaccttgtcaaggagtttgcctaaagtgctccagtcacgcatgttgcctgggcaccactcttttgcttaaaagaagtgaagtcacgccaggtgattgaactccttggaggatgaagtaaaatgaaaaggcaaattcaggcactcagacctgtctatttaaagtttaaaactccgctgctgtttgttactttcctcacaccttcccccaatgaaagaaaagtgctgatacctcgtaaaagctgctactctctacttttaaaagggcttgtatgattagatcaggcacacctggataatcttattttaaggtcaactgtacatgatagaacatattatgagtagtacttacactcatagggatccaggtattagagtaggacatctttgggaggccatattcaaattctgtctaccacagtagattttgctaaattttcctaaaggctgtttgcagtgtggaatctcaaatcttattagtgaacttttcatattcagttacattaagttcattggttgatcttgcagtttgaatgcctcttttacccatgcatgattttatagcatcatgcttcagtcatttggaaaatatcagatcaccaagtcatgcaggtatttcaaataatgatataattcattatgtaatatcacacatttattaatgtcacaagtctcagaaaagtaatggaggcggccgggaacagtggctcacgcctgtaatcctatcactttggaggccagggtgggtggatcatgaggtcaggcattcgggaccagcctggccaacatagcgaaaccccatctctactaaaaataaaattagccaagtgtggtggtgcatgcctgtgtaatctcagctacttgggaggctgagggaggagaatcgcttgaacccagaaggcagaggttgcagtgagccaagatcatgccactgcactccagcctcagcgaaagagtgagactccgtctcaaaaaaaaaaaaaaaaaaaagtaatggaggctgtgaagctcattgtggcagatacatgttttgaacaaatctgtagcacctaaatttactcatgcctctttgtaattcctttcttctaccttttactaccctgtcacagccaaccactaaggtgctttctgtcactaggtattagcatttctcagaactcttaaaaatagaatcatgcagtaagcacttttttttccactaagtataattattttaagattaatccatattgtaatgtgtatcaataggttattctttttattgctgagtggagttctatttttttttttttttttttgagacggaatctcgctctcgcccaggctggagtgcagtggtgcgatcttggctcactgcaagctccgcctcctgggttcacgccattctcctgcctcagcctcccgagtagctgggactacaggcacctgttaccatgcccggctaatttttttgtatttttagtactgacggggtttcaccatgttagccaggatggtctcgatctcctgacctcgtgatccgcccgcctcggcctcccaaagtgctaggattacagacgtgagccactgcgcccggcctggagttctatttaatgaatatactgcagtttatccattcaactgttgatagacttttggatgatttccagtttggggctactctaaatgaagttgctgtaaacattcctgtacaagccttcatctggacaaatgctttcattctcttgggaaactgcctagtagtggaatgaatcgatcatctggcatttgcatgttaaattttttaagaaactaccaaattactttctaaagtttttgttctagtttacattcccaacagcagtctatgatagtttcagttcctccccatcgtcgtcagcacttacttggcctggttagttgttagcctttctaatacttctataccttattgtgattttaatttgccctttcccattgaataatgatgtcatgcatgttttcatttgcttatttgacgtttgtatatcttcactggtcaagtgtccaaatcgtcttgcctattttaaaaattgggttggttgttttcttgtaattaagtcttggttctttacatattctggatacaaatcctttttctctcagtctgtgtcttgtcttttcattctcttaacagtgtcttttgaaaaacatctttattttgataaagtttaattaatcaatttttttcttttatggatcatacttttttgatggtatatctaagaaaactgttgaacccaaggtcctaaaagttgtttcttaagtttacttttagaagtttaaaatttatatttgagtgtaggacccatttcaagttaatttttgtatatagtgtgggaaatggttagaagtttatatttttggcatgtggatatccagtttttccagcaccacttgttttaaatgactattctttctctcttgacttaactttttaccttcatattaaattcagtttttcatacttatatgtgtctctatttttggactctgttcttttctgtcaatccttttgtctccatgccaataccacaatgtcttgatgacagtagctttataataagtcttgactcagaaataaatccaaacatatacagtcaactaatttttgacaagaagacacaaaggggaaagaatagtctgcctgacagatggtgctgggaaaactgcattttcacatacaaaagaatgaaatgggacccttatttataccatacacaaaaatcatctcaaattggatgaaagacctaaatataaaaccagaaacaataaaattcctagaagagaacatgggggaaaactctgggacattggccttggtgatgattttttggatattacagcaaaaactcaggccacaaaaacaaaaataaataaataggactatatcaaactgaaaagcttctgcacagcaaaggaaacaatcagcaaaatgaagcagtagcctacagattgtgaaaactacttgcaaatcatatacctgataaggggttaatatccaaaatgtataaagaactcatacaactcaatagtagaaaagcaaataactcagtttaaagatgggcagaggaggctggatgcagtggctcattcctgtaatcccagcactttgggaggctgaggcaggaggactgttggatccaggagttcagaccagcctgggcaacgtagtgagatcctgtctctatgacttttttttttaaattaaccagacatggtgacgtgtgcctgtagtcccagctactcaggaggctgagatggaagtattatttaagccagggaggttgagtctgcagtgagctgtgatcatgccactgatcacaacagatgtgccacaacagagtgaaaccttgtctcaaaaaaaaaaaaaaaaaatcacatacaactgatgtaccaaaagagagcaaaacattgtctcaaaaaaaaaaaaaaacccaaaaaacaaaaacaaaacaacaaagaactgtttttaaaaatgggcaaaggcctaaatagacgtttctccaaagaaaacataaaaatggccgacagatatacgataggtgctcaacattattaatcatcaggaaaatgcaaatgaaaaccactgtgagatagcaccttactccaattaggatggctatttttaaaaagggaaaagataacaaatattggcaggggtatggagaaatcctgtacactgtcggtaggaatgaagattggtacagccattatggcaaacagtatgaaggttcctaaaggaattaaaaatagagctaccatgtacctcagcaatccctcttctgggtatatgcccaaagcaaatttaatcaccgcttgtaaagatatgtgcactcctatatgtattgcagtgttactcacgatagccaagatacggaaaaaaactaaatgtttgtcagcagagaaatggataaagaaaatgtgttacatatgttcagtagaatattcttcagccgtaaaaaggagcaagatctgaccatttgtcaaaacacagatgagcctgggggacattatgctgagtgaaataagccagacacagaaatgaaaatattacatattatatatggaatcttaaaaaaaagtcagatatacagagatagagaatgaaacgggtcactagggcagagggcaggaacagaggaaatgggaagatgtaggtcagaggatacaaagtaggaaatatgtagaatgatcaagtctagagatgtaatttacaacatgtgaactataggtaataaaattgttctgtgtatgggattcatgctaaatgagtagagtttagctgttcttgtcacacaaaaaaatgggtaactatgtaagatgatggatatgttaatttgcttcactataatattctttttaccatcaatatgtattccataacatgtacctttaatatacacaataatagttctttaaaaagtcttaaaatcaggtagtattagtccggtttattcttctttttcagattcttttagaagtcctttgcatttccatattaattttagtattagtttttcagtttctatagaaaggcttggtagaatttagagtgagattttattttatcaatatatcaatttggggaaaatagacttcctagcaatattaagctttctgatccatggacatagtatatctctgtagttacataggttgtctgcaatttctctaagcaaggttctttactttagcatatgggactcttcatcttttgtcagatttatcactgatgtaccactaaaagaagaaaggactcaaagtaacaacctcagcttctagcttaagaaattagaataagagcaaattaaaccaaaataagtagaagaaaagaaacaatatagatagcagcagaaatcaatggaatggaaaatacaaaaacagggaatagtgataaaactaaaagctagtcctttgagaagattagtaaaattgatgaacgtcttcccagacttatcagaaaaagactgaaattactaatatgaagagagaggtgatatcaccacagaatattcagatattagaaggataatgaatgttatgaataactttatacaaattttattttatttttagagacagggtctcactctgtcacctgctggaatacagtagtgtgatcatagctcactgtagccttgctcctggcacaagcagtcctcctgcctcagcctcccggaatttggtaacttagataaaatggacaaatttccttaaagatacgaactacctaatctcattcatgaagatataaagaacctgcatagtaccatatcttttaagaattgaatttctcatttaaataaccattcctcaaagaaaactccaggcctagatggcttttctggtgaattataccaaacttttaagaagaaaatgttaccaattctatacaacccactgaaaaagttgaaattgaagaatatttctaaactcattatttgaggccagcattaccctgattctaaaatgagacagaaacattacaggaaaagaaaactgcagaccaatatcattcatgatcatagatttaaaaattctaagcacaattttaacaaagcaaatttaacaatatataagaattcatgatcaagtgggatttatcccaggactgaaagctgatttaactttcataaatcaatataattaatcatatagataaaatagaaattatatgattatttaaatgcagaaaaaaacatttggcaaaatccagcaccctttcctgatttaataaaattctctgtaaacaggaatagaaaacttcctcattatgataaagggcttctaagagaaacccatagctaacattatatttaatgaatgaatgacaaatgactaaatgttttccccctttatatcagaaataagatagatatgctggcactcacaacttctcttattgtactgggtgttctagttggtgcaataaagaagaaaaaagtaaaaggcatcttttaattgtttgaatatgttttctttgctcccatatttatttgccagtatttaaaattaaaatggtaagatactgtagtattataagattatgtggtattaattctacaaaacttaaaattaattgatttttttttaaactttttggatttatggttgaccagttatgttttcttatctccagtgatgtcctctttagacatggctttgaatcctctagtcttatacaagttatatataactttctaatattatcatgaaaatagggccaaaataacaatttgaaaaatgatataattttgtgctatcttctttttctttttctttctttctttcttttttttttttttttttttttttttgagacggagtctagctctgtctcccagccgggagtgcaactgtgcgatctcagctcactgcaacctccgccttctgggttcaagagattctcctgcctcagcctcccgagtagctgggattataggagcccaccaccatgcccggctaatttttgtattttttagtttcaccaaaaacagggtttcaccatgttggtcaggctggtctcgaactcctgacctcaggtaatacacccacctcagcctccctaagtggtgggattacaggcgtgagccaccatgcccggccaattttatgctattttcaagttaaaccttggtaacaacctcttcccaccttctacttacttctctcaatatattgctgtttaacatctactataccactttttgttctcatcaaagagcagatgtacatctcagaatttgtaaagataaatcagcagaaaagcaaaaagtcccttgaatgaatttccactacaaaatcaaaaccttataaatacatggttatgaaaagcactggagaaactaaatagacttggttagcttttaagaattatgggatttctcaagaccatcctggccaacatggtgaaaccctgcctctactaaaaaaaaaaaaaaaaaattagctgggtgtggtggcgcacgcctgtagtcccagctacttgggaagctgaggcaggagaatcgcttgaacccgggaggcggaggttgcagtgagctgagatcgtgccactgccctccagcctggcgacagagtgagactccatctcaaaaaaacccagaacaaaaaacaattatgggatctctgtctccttcccttatttctttgcttagttcctctctccctcttatttcaacatgtaatgacaaacgtacagagttattgaaaggcagtagaggttagtggtgaagagtggagctctaataagtggtgataaaaatatgaggaaaccagaacattcatacgttactggtagaatgtaaaatgatggtcactttggaagagaatttcaagtcttcccaaaacgttaaataaaaatctttcatatgacctaagaattccactactaggcatctacataagagaaataaaaacctctgtccgtgcaaatacttgtatgtaaatgattatagaagcatcatttataattgcccaaaagtagaacccaaatgtccatcagctgatgaatgaataaccaatatttagtatatccatacagtaaataactattaaacaatgaagaaaaatgagctactaatatatgctacaacatggatgaacctcaaaaactatcccaagtgaagtcaaaagactacacgttatatgattccatttatatgaaatacccagaaaagacaaatctatagaaaaagaaagattgtattttcctggggctggggtgtagatggggatagacaatagacaggcatgagggttctttttggagtgatgaaattattctaaatttgtcaaaactcattgaattgtacaataagctgggtagaatttacatatataaactaagcttcaatatacttcttaagaaaaacaaaacaacaaactcaagagccaggcagtcttagctgaaagcttacttagctcagtctcttttaagttgtatgaacttactcaacttacttttaacctctctgtgccttagtttccttatctgtaaaataatactttgggaggctgaggcgggcggatcatgaggtcaagagatcaagacgatccaggccaacatggtgaaaccctgtctccactgaaaatgcaaaaattagctgggcgtggtggtgtgtgcctgtagtctcagctactcagaaggctgaggcagaagaattgcttgaacccgggaggcggaggttgcagtgagctgagattgcatcactgcactctggcctggtgacagagtgagactctgtctccaaaaaagaaataaaaaaaattaaaaaataagattgttattaaatgtactgtgattgtgtgtgtgtgcgtatgtgtggtgtgtgtgtgtgtatatatatatatatacacaccaaacacacatatgtaaacatctacataaatatcttagagtgcttgacacataatcactatgtgtttgtgctcatcatcatcatcagtatcattatacttcataattgtctgagaggaaaaaaatggctaattaaaatgcctgctataatccagccagaactttaactcagactgaacctgctcctgcccctgcttctaactctattctaacctgatacttgtgtagtcaagaatgacctaaaaacaaattgggaagcacagtttgtcttcagttcttcccttttaccatcatttgtgattgtatgttgtaatgtttagcctttatacgtgtcattttcttcatatgtgaaactgaagtgattggattacatgacctctaaattttagctataaccttgaattgtttcattgttatgaaatttttttgaaaatttgaaacctctgataaactttaagaccacttcaaaattatttgtcttttctctttataaaagacataatagggaaataaccagctagtttttttattataaaactagtacaataatatatagtatcttacatttacataatattttacagttgtcaaagcactttaacattatgtcagttattctactagaagttattatttccatttacaaagaaactattaaataagtgaggtacagagagcttgaagtgacctgtcaacatcagttaaatagaaagtaggctaatagtactctatttctactattgtgtaattagatttttatgtgggtcaaaatatataatccttttatgaaatgaaaattcaagcaaaatgtctgtgcaagatactctgtggatgaaaacatgaatccctatttcataatttctcaaccttgtgcatagataaataaatagctcgtttcagtaaacaggaaaatttctgtttgagtttcttttttctctactgggaataaagctgtggagggaagatttagaaaactgttaggttaaaagcaagaatttaataacttcctagtgtctaatatgcaaatcatttctaaaatgtattatgcagagatttaatatgctcctgttcttgtcagataactgagcccttttggaatcataaatccaaaatatgttttaaccagagtaatgtttgagaagattataagcatttgagaattcaagtttagagtgagtagtccaagatgattctgtctttgtttgaatcatctcttgaattatgaatactttgcttgcttgcttgcttgcttgcttgcttatgagttgctggataagtaaaatcaaacaaaagtcagctctaaatggcaatgggtaatatgaaaaaaaaaccctaatatgctaaaagatgaccccttactttatagacaagttattacttagaaattcaaattaagagaggacttttaaaagtgacaagctatgagttaaaagaatatttctagtcctggctgggcgtagtggctcacgcctgtaatcccagcactttgggcagccaaggtggggtcgatcactcgaggccgggagttcaagaccagcctgcccaacaaagcaaaaaccccatttctactaaaaatgcaaaaaattagctgggcatggtggtgtacacctgtaatctcagttacttgggaggctgaggcagcaggatcgcttgaacctgggaggcagaggttacagtgaaccaggatcacatcactgcacttcagtctgggtgacagagtgagaatctgtctcaaaagaaaaaaaaatatatataacaatatatattatgttatatgtaaaatatgtagtctagacagctgtcatttgttttcatatatgtgattaaattaagactgcaatgaaagatgccgtgatgaataggagacttagcaccttaacctccaagtacaataacacctgtgctgactctgggaaagctggttaattttagaaagcctgaaaaaaaatgtcagtctcaactttttctttccctagggattagtaactactcccttctttctgacctgaatgttctttttgagttcagaacttcctggaactaattaaatgttatattatctggtacaattctcagctcacacagactcatggcccttggcaatcctcaaactcatcgtaattttaaaatgacttatgactttggaacttttagaatttttgaagagttttcaccaggcttaagacattgtcagaatttatctcacctctgtaacatgacattttatttatggtttaaaaaaagtaattgagttcatttggtttattttaggcttagaaattttaggcttagaaatctagacatgattatttatattgttctcataaatgtctttaagatttccatataaatctttcaattgtcaaaattcgttttcttttaatttttcatttgcatttgtaatttctatagtacatttcactaatttttgccaaaaagttaaattcttttaaaaaataaacatttcatccttcccatttattgtgaaattttatatttttacaggattttaacagtcagtttcagttatgtgacttcacagctctggaaggttactatggtagttaactggcaatgacagtttcagctgctttggtaacaaatcccagcatttggagtctagatacttgcctggcatttgtgtctttcacttgtgataaatgtagaaaggataaattgagccaacaaaggattaaggaatgtgactcctgcctcatactcactaaaagagaatcctcaaagtctgaactggtgcctttcctaacatagtttaacccattgccaattatattacaattttacttcacagtaatcagttttgaggccgattaaaagaacaacatagtaattctcgaattaatatttcattcaaaaaattttaagatatagcaactcagtggctgaattttttaacgttgcaaacggattactaaagaaaacccaatactgtggagtttattattttgtgttgtttgaagatgatggtagaatattcctttaaaacaactttgatatgagcctaaatgcatgcaattatagattagtgcacagtaagtttcaatttgggagaatgagtactttttttcttttttatgttaactgatgttatatctaaacctagacattcccatttttattgtataattcaagaacattacattactgaaagtcaaaatattatgctcttggttgtcattttacatcatgcgtaatatgtttgatataatgtattttcaaaacaacatttagaaagatagcaattttaaattgatatttctttctgaccccagtgataccttggattgctttagtatttcacttgctgcttaatatcccaaagcaaatacagatggaatagtttaaactggccattcctgcagatactaaagtcagtaatatccttgtaaattggagttactttatttaatttacatgtgacataagttggtaacctattggcattccacatgtgtggtattgaccttttttcctaatgttttttagatatactctcttagtaggccactgttttttttagtaggcatctattctagtagtgtatattctttcccagaggttgagctaaatgataaagacattaacccagaagaagaatataagaaataaaaatataactatttcagttaataggatcactcctgtaaagaaaatatatctataactattactctgtcacctctttgagtggttttaaagagtgccaagggatttttttctattaatgaggaaatgttggtatgttgtaagaaacattaagttttcatggtacatttgagccatagatgcattatgtatgtctgagtagtattactcgtaggctttttatgttctgagcttcgatggcatttatacctatgagtaagtacctccagcaaagaggcaggtggcatggtgagcaggacaaagcatgttctgaaccactcttgctcttagattctgttttttaaatgactttctgttatttgaagttccttcacaattgaaagtgtaggagttatgaatacatatgtatccttccacatgaatgaacatttctttaaaggtactgtgagtttcactgttggctttgtaggtgataatttttatatttttgttactatacatggaaaagtcttaaaattccaaaagatgaacaaagtttaatgtaatattttaaataataagaaaatttattattggcagtctacttatatttgatgcaaatgttagaggtgtgagcaggactagtgtaactggtgaattcaattgaaataaaaaacaaattttacgtaaaatggcttgtttttacaaataggttttcaccaataacctatccaatatatatgaaactaacagtgagtatcagtatgaaattttcattttatcagaattgtaaggaaaactataatttcattaaaacagtttggagcccatactgtttttccaagattaaaagacaactgaaaatcctttgaatcaaaattttaaaaaaacatttattgaatccaagttaaaagtgaatattctgttttattttttcctgcttgcactgatgtaccatatatattcagattctattatgtagaaaccaaataaaagccatgatctggtcagcattagccaaagatattgtaatgctactcttttatttgtaaattttatgcctttttaattgtaagttagcctctgtattcagaaatgatgacgatacaaagtatctggactcttctcaagtttgtggaagcgatgaagcttatgcattaatattaaggaaggtaaatcagctgagcttggtggctcatcccgtaatcctagcactttgggagcctaagggtggtggagcacgtgagcccaggggttcacaaattcattatgaaggattacatattatattaagcattgtatagcctcttgtcagtgaaatgtgaaaataatattagaaattgtcataacaaggttttgtacatgtggaactttttaattctttatttgctttcatttgtcctttcctgtaaaactagattgtcattagtacctgtttataagtgtgtatttcaattccagagagaatatgattgagagcctaataaatgtacctacaaaatgtaacctttgtttgaaagagtaaatttgcctaaattattctgggtcaaacttgagaaaacatgatcacatttgataatatccgcattcaaaatgaaagattttgtatagcaaagtgaaggtgattaaagaggtgactttctatagcgtctttaactttttattgtaagagattacatatattaaatattttcaggttagaatctgtttttttaagacctttttcttcttctgtgtttgtctgcgttagtttcaggaacctttaccagatcattgataaagacttcaaaatgaatatatctcataagatgatacctgctaccagcaagtggttgaatctctgtattttctatcttgggtgctataaattaaggaataaacccttcctgtagttaacacctatcatgatttcatgccatttgttgaataggatgagagactcaaatatctattgttttacaattttttacatctttatatgtgcttttttaaaataaaagattttgtacataggtaattacatagcacaaaatttataaatattacatcattgaaattatttgcttttaagaatcaaatttatacttctaaattctttttaagttaagtaggatttctaaactaatgaggctataatttgatggagctttattatttcaaaaatagttgaaacccgtcagttctgataaaaataaacccaggagatgcaacgattaatttattttttgttggagacaaatgtgtcatcctgtatttaagtgactgaaacctagaaatacacctgtttttctttaagactttctattctttataaacctgttatgagatttggattaattacactatttgttaaatacttattgggcaccagctttgttccatacaaaatacgctggtgaaaaatacatcagtgatctcttttctcaaagaagtcacactgtaatgggagaaacatatgtttaacaataatcacaaatttatttcaaattttgatatgaaaaaaagtgatcagagggatggtagcaggtggaatctattttgttttaggggccttaggaaacatcatctggaggtgacatttgtgttaagatctgaaagacaaaaataaccttgcaaaggggtaggaaaaggctcagataatagcaaatgcaaaaacctgtggtgggagaaggcttttgtgtttggggaacagaagggtagagtgactgcggctcagtgagccttagagagactgacataagattggaaaggtaggaccttacaggtcagggtaagcaactggattttatttgccatacagtcagtcgtgtgttagggagtggagtgactggtttgttgttgttgttgttgttgttgttgttgttgttgctgttgctgctgctgctgctgtttttaattttcagagattacataggggacaccaaaaccgtctttctgtccatgacccctattctccttagtttctcttcttgaagatagctcctcttactttttgtgggatttttattgttgttatttttgtttgtttagttctgtttttatccttccagagcttttttatgcaaatggagacacatgcatatacatctttttattttttatcacaaatgatagcttatacactgttctgccctctttattttttttaatttgataaaatatcttggagttatttacatcagtatatgtagatttaatctattcttttagcttggtagtatctgttcctccttgataattagttttctaatcatctgctactatagtaatacagagtgcttcagtcaaaattttgtacatctatgatttctttcttgtagatatatattttgggttaaattctactctcttgaatatctaaatagatatggtataggaaagattcatgaacattcccaaaaatttatacctctagatccacagttcaggtagcattcgatttgaactcaagagatttctagaaaatatagtggctcccggtggagtctgtgcttccagaagcctttataatattttatataaaagcaggtatgtataggagatgagtttacaaatagtcaagcaagccgcacatctagccgtaatcatagaaggaattttactctttatgaataagaatgtcagaaagtattttttttctgatacctctatataatttcccctcagaccaaatttattgtattccagaatactcgattatggagtcagaatttctttagaaaactgagaaagcccagtgggaaacatacctgctcccaaagcatttaggtccactcagtcatctcttttttttttttcatttttttgagacggagtcttactctatggcccaggctggagtgtagcggcacagagtccgctcactgcaccctctgccttccgggttcaagcaattctcctgcctcagcctcccgagtagctggggctataggcgcccgcctccacacccggctaatttttgtgttttttgtagagatggggtttcaccatattggccaggctggtatcgaactcctgaccttgtgatctgcctgcctcagcctcccaaagtgctgggattacaagtgtgagccaccgtgcccgttgctctgttattactcactttaacacttataaaaagaaatgctcagtgggatgcaaaatgcactgtaattcttatttagatgctgttatacctggaagtgacttttgccaggctaaacatgaccactgtggctttggaaccatatgtggttttaaattattgctctactatcatttgtgtgactttaagcatgctacttgatctctttaagcctcaacatttttacttataaaatgggaaaagaatataatgctcaaagggttaaatgaaataatatatgtaaagaatgtggctcatttcttaactcattctgagttcttagtaaatattacctgctggtaaattaatctgggctgagaagtaacattatgtatagatggaattttcagttcaatgagctatcatattcttgtaatgcctaaatatttcagaataaatgatatccaaccttttgaaaactcagtaatttcacagcagtagtagtcgcccattttggcttagtccaaatgttaactaactaattaaaaaattaatctgggggccttcatttttttttcttcctactagactattaccaaacaaattttaatttcagagaaagaatgctattaatgtgtagatcagtaaactttttcttgatatttgcaaatattaaacctttagattctagggaaaaatcatacaaatacaatacaattacaaatagcagctttcagtagaccaaacattttctaaaagtcagccataaatgtagaaaggaatgtgtttctgaggtgagatataaaaaatgcttatttgtaataggcaagagtttggaaggcagtttggctaagcaaaatcacaagctcagagataataagagataggcaaatcaaagttagacgacacatggatagttagtaggtggcttagaggacaagagatctttagagagtttaaaaactgtcagagatggatacgaatgaatagaagaacactttctgaaatgtgctgagacacataggaaaccagagtatgtaagacagggttaaatgataaaataagttggctgcattgtctctaccccctgagtatattgaagatagatttatgaagagtttaattttaataattgaggtgggaaatgactgtggtatgaagagtaggttttgagtccaagtgaggataggttctggtagtattccagagcaaatgacaaggttgttgccaaaagaagaaaagatgttgatgtcaaagattgttcaaaatgtcctatttccaatccatcattgacgtccctgtgttatttacttcagaaggatgagccatagaattttttttctgtttgaactctaagtggctaaggaaataaaaaccttaaatgtaatggatgatgagtaaaatatttggtctgttttacttcatttgttattggtttgtaattcttagtgttgaatggacaataaagttgttttatataatctgcagccacacataagcttagactattgaacaattctaagattgtacttttataactttttacagtagcaatcttaaacgttgagatttgcctattctcctcattaagtgtaaatcaaactcattggcagtccatttatgtggttttttggagtaattattacatgataacctttttaataataaaggttgatttttttttttcatctccgcaaccatatgtccctgcaagtccagaaatagcttttaaataaagctgggaaaagattattgaaaacatggagagaaaaggagataaaaacatgtttcacttggtcatataaatgaaagagcataagacatgccacatgtttttagacttaaggtctatccagttcagtataatatgttggggaatgatactcttacagactgatttgaggaaacagtatattttgaaaaggagtattttaaacatcaccatgtttggtgatgagtatacctacctttccttagaagataatcgactttggaaatactaatgaaagaaaaaactgtgaaatttaggtgttccctgtgacgagcaagataataacataacagtagctccataataatataacacttattgtatgccattttactgatggaaaaatatgcattgagaggttaagtgaattgcgaggtggacctgttgttaaattgtagaaaaagaatttaactcttggctctagtcagtatgatttagactcaatacttgggaaaagaaagtagagaagaaaataagtctgttaaaaataagtcacagtataggtaaggcttttctatattatttagaaaaaaggacaaatttagaaatgcgaataacataattcagaaacatttcaggattatttgcaatgaaatagaggcaatttgattataattaatgcagtcattttgtaatacaaacatgattatttcatgtatcttttgctgaaaatggacattttttaaaaataaatgattcatctatctttcaaccaacaggtacatatcaagtatctatcgtatggcagctttgctgtggataatatataccatgaattctatattgtattttctataattgtgaatgttccaaattcgtgtatgtctatcttctattaatgagaatatcagtaaaaacatttcttaagcgaaacattacactataattaaatttcactggtttttctgtaatgccctctttcgcttccaggttacaatagaaggcattatgttgcatttagttgtcatatctcctcagtatcctctagtctgtgagagtttctcagtctatccttgtttttcatcatctttgacagtctttgagaatattagctagatgtccatggaaatgttttgctgatcggagtttgtctgaattttttctcttcataattagactgaccttatggattttggaaaaatatcacacaggcaaaatgcccttctcattatatcacagcagggggtacatcatatccacatgacatcactggtgatagaaacctacatcacttgagtaaaccattttatagtgacaaataaatgccttgtaattttatctctatatgtatcatctttttcatatattgttcctattatgcttgaaaatatacaaagatcatagacaattccttttaagatatagtgttcccacaaatcagtctataacagtatacagtcttatctttagaaagctaacaaaattttgggtttttttttccttgttccaattcaaaaaagtagtatatgagaagaggacacggggaatttttattatgtttcattggtagtgcaaaataattttagaaaacatataattgacaatctggacatcatgtgtccagaaatttttaactaacattcttattaagcaacaaattaatgagtggagaaactggaaaaaagccattaactgtgaaaagctttacatggcaatgtttatatagttctatcgtcatgagggaatttttcttcctgaatatttgctagtgatatataacattttttgacgatggtctcggtggatatctaattttgagtgtgcgttatgttacgaacctaattcttcatacagaaatataaatcagaaagatattttaggttcacatttttctcatataaataagaccaagattgtatatacattgtactgtttgatataaataatttggatataactaactagatcttttaagaaaattgtttacccttatgacatttctgctttcaggcaggcttgatttttttctgtgctacctgagtgcaattaaaaacatgacagaaaaaaaacctctttctattctatgctcgcaaatgaaaactgtaaatgatgtgagttggcatgtatttcaaaagatagtctatctaatgtattaggttggtgcagaagtaatcacacttgttgccatgaaaagtaatgataaaaacttttaatggcaacaaccgcgattacttctgcaccaacctaatatttttcagagtcattaatccctctgggtttgttcccaggactttgaaaactcagattgtgcggtattttctgttgttgttacaacgaaaaataaatgaaatcttatgccttaatcaagtgatcccagaaaaacagtaggccagtgatgtcgtgtttccctttaatccgttttttagtgatagtgacttaaagctatgtttctctttccacatccagctatcggactcaaaggaaatataaggtctataatgaaatctgctcgaagatgagcatggtatactctgtattggtttgataggactgaagtaacaaaatatcacaaactatgtgatttaaaacaacagaaatttattctctcacaactctgaaagttagaaagttcaaaatcaaggtgtcaccagggccatgctccctccaaaagctctggggagtaatttattcctgcttcttcctagcttttctggcaattcccagcaatccttggtgtttcttaatttgcaggtatatcattcagtttctgtctctgcaatcacatagccttcttccctctgtgtgtcttcgtgtctctatattcaaatctctgttttctttgttttataaagacactagtcattggtttaagagcccaccctaatatgatcacataatgagtaattacatctgcagaaatcttattcccaaataatgtaatattctgaagtcccaggtagacataaattttggggggacaatgttcaacctggtacacactgttagttgttttaattaatagatctgtgtgttttattgggttatgttatattgaaagacagttacaaaacagtagtttatgttctgctaaatccatgatacatctgattatttgagatacttgaggagctacactgtccaatctcagctttcaacaagactcaaacaccttgaatttggttagtggtcagagcattgatgaccatctctgtcctcatggctcgtgccatatagtccgtcataatttatttaaggataatatgagctctgaggctagtgttaggctgtgaatcatttataccgtaattgatcctagctaaggggccggtatctgcaccttagcatgtctttgttttgtgtggtttatatctcaccattatataaatatctaatggggaaaactatgtatagtaaagagtttgtgaatttaaggaacttgtgaactttagcacatagcctttatgaatgtgatactttcatatccaaataatgattacacttttcccttcgtaaatcaatcctcctccccttccacatattccaaaattcatgcatactcaggttctgcagtgggccctgcagaacccacttacatgaaaagtcagcctttgaaaaaaatccacatataagtggacctgcacagttcaaactcaagttgttcaagggtcaactatattacactacatttaggaaggaaaagtaacaaattgttaaactcttaataataaaaaaatacattattaatttgtgtttacttggataaagctttaaatattgagtaaaagaatcattacctaaaaattttacacttttctttcgtatcttataaacacttatcctgtcttactcaaaaatgtatttgaaacttgaggttggctaaaatgcaaagaaaatagaaatcacagtgaaggaaaaataaaaagctggcagggcaaaatgatatctagagtatgctttgtgcaaaacactgttttaagcacttaacatgtagaacttctttgatatcaccatagttctttaaaatattattatcctcagtttacaaataaggaaactgaagcaaagagagactaagtaattagctgtccaagattccacacttttcagttgctacttgtcaggattcacatctagccagaatccagtgccagttctctgaatcacagccctatagtgaaaccagagtagagctgttatatcaaaagatacattgtaatatcatgcaggattgctagagttgggtctcaaattaatttctaacatctttagaagtaagtcaaagatagaaactcaataaactctaccacattcgtagtgactacaaaatttaatttaaattttccctggacccatagctgtccttggccctaaagcctggaattccatatacttggagttccactctgcagtactattaatacagtaatgaattttacagctatctcttggagcacagctcaaagtaaattaaagagggcggtcaggaaacctgatttcataaaagcatcaaagtaccatttagaatcttcatggaaattgaagagttgtacaggtatgttttggaaccagggctttgctcgcttttgcgaaagcagagtttgggtcatataccttggcatgaatcatttttcagatacagtgtgttttgcagtaagtgacgtgaaaacctaagtaaatgttagtttgctgtgctaagtattcataatactaacatacaacgtgattaaagaacaaatgattctttggaaatataaacagaaacaatactaatgaattggtgacatgttcatagtattctgtgtatcagtatggaatatatcaaatttaagttatatctaaaccaggtattgctaatttaataaaatcagtttttaagcatcaaaattctgtgtgtatatatcttagctttctaacttttcctgtgtcccttctgtacacttccccttgcaaatccttcaacccttctctcatctcttgtttacgctgctgtctcttttcttgttcttttttaaagagtaattccaaagattctgactagttaagacttagaaaaaaattaatgtaaaaaaatgtagttattccattaataccattgcttgccacttttctgttgttatctaagcatggtatgttaattacatctagttgtaaaactgatctgtaaatcaatagcaaatatatgaaagcatataactttgaatattattttctagattgtttcttggctaaaaatatctttggaatggcttttgcttagcatttttttttttttttttttgaggcagagtctcgctctgtcacccgggctggagggcgcaatctcgactcactgcaagctccgcctcccaggttcacaccattctcctgcctcagcctcctgagtagctgggactacaggtgcctgccaccacacccggataattttttgtatttttagtagagacggggtttcaccgtgttagccaggatggtctcaatctcctgacctcgtgatccaccctccttggcctcccaaagtgctgggattacatgcgtgaaccaccatgcccagcccgcttagcatttttaatatgtacctgtctaccacttaaaaacataccgaaattaatcgtggttggaagctaatcatagttagagcttgcaataaatatattttgtaaaaaggaatattatcttttttcagtttgaaatgtttcttcccttctaaaaactaattatctgggattctccacataggagtggcatgcatatccataatcataataaagtatataaacactaattatttttataatgtatcttcagaaaagaaaaatgaaaaaaaaaattagaagctatttcagggaacacatactcttttaacattatctcttagtttttatcagtctatatttttccgattggagctttataacacccacctacatttttatattaattatgtgtagcatttttatggctattctttctaagaatttatatcaaaaaaattatatataaggagaaagatagcgaaatcagtaaaatttagaaccaagacattcaaagttatcttctatcatgtaacaaaacagtgacagaaactattatgtagcaacattactaatattaggctaaaagaaaactttattactatgctttcattgaagtaaattttaccctgtttttattttctcttagtggtcattttgaatgacttccttgcccactggataattagcagattcatgtacttttttatagcattctgctgtaatttcttttgttttttgtgttttgagacacggtcttgctctgtcgccaggcttggagtgcagtggtgtaatcatggcacactgcaacctctccctccctggctcaagtgatcctccattcttcccacctcagcctctcaagtagttgtgactacaggggcatgccaccacacctgcctaatttttgtattttttatagagatgggatttcgctttgttgcccaagctggtctcgaactcctgggctcatgtgattcacctgccttgacctcccaaagtgttgggattacagatgtgagacactgtacctggcctgtaaggttgtttcaaactggaagtctgggttaggttccctgtaatagcaataacaacatatagtaacaacagcaacagtaaaagcaactatatcttgagtttttagctttctgtatttcagacactggtaatcacttttgaatcttcacttcagccctgtgatgtggttattttcatgccgtcattatggatgatgataagcctgaggccctatggccagagccaatacacagagctaacttatttatcacagagagcctctgaatcaggccagtcttcttcacatctcttacacttgtctgccttttatataccatcataaatgtcagctaccttgactgccttttatacactgtctttaatatcagctatattattaaaagcaataatgaaactgcgtagtgtcgaattttaacaatattgctaaaatgaaaaatgttgaggcactgtggggcaaaaatgtgaatcactctttcagacagtgaggagtcatcaagagctattccaagagaaatcctatttagagtacatgagcaaccgtaatgaaactttcttagatttttacatcaatcttgatttttaccttattatatgaattaactgctaaatcaagtcttgtctggacaattaaccaaaaagcctttaaaaaataccttaaggtaacataattgttaataaatatcaataatttctacattcagaatcatcttttaaaataatatacatatcttattaatgaaaattactacaaaatgaagactatggaatttagcttttaaaattgattcttcccagttaccattcattttaaagcatagtatcaatttgttatggtccatttgcattgcagggtctttgtaaactctgtcattaaacctaacagaagtagaacatgtacttgagaccatccatcagggcaatattccttgtttcctgccctgttgactttcctttttccatagctggtaaccactatgtgtatcatttgtctcactaataacagccaaccatattaaggaacaatgaaaaagcagtggatatcacacaattaatattattgctggttttttaaaatgtttttaaattggacaaagcattataaagaactttcaaacccatataattagtttttttgtaatcataaataatttgatttgtttcatcttatatagtacttaagtattattataatttccactttacacaggaggaaattatggatcaaaaagattatttattgtaaacttgcagatcaaaaaagtttttgaaataaactaatatcaagtagtactagtgtcagcaatcaccagtatactcaagggactgtaaaagtccaaggctgggcccaagaagtatccaggagtgcttcagaatagttcagcaacatctgtgtgaagaacacctatagtgtaagaatacaaaaggagcaaaatgaaagacatatgtgccactagtgacatccctctatactccctatatacagcagttaaaggctcaaggatacgtccatggaatctacaaactgtcacaccagtggtaatcttaaaaataatgctgtggagaatcaggtagtttattagtttattactagccagaaatattttttatccactgacaagattattaaaatctgcgtggctaatttaatattgcattatttaggtagctccatgtctgggtgatgtctctacatctgtcataaaactaggagacattccagtttctttttctttctcagtcaacctggatagatctggagaattgagccagctgtactaatgttcttttttctcttgagtttacctcaagaaagaggaatatgcctctgattgggtctgtttactgactctccctctttcacatcatccacacaatgagaagttgatcaactgttttagaatagacaactgttgtaaaaactagttacacatttagtaaatattgaccaagttactcaaatgatgggtgtagtcacacattaggaatataaaagactgtaaaccctgtgggagtttgtatcttgaaaaatttgccaacagattacatagaacatctccactattttctcatattttgaatactgtcagagttggtccccttatgacttaataagtccataagagaggatcactagtaattgggttttaatatatagcttaccaggtaaatctttttgccaaaattcttacctgatctcttggatggaaagaagagaacgtatgacattgcattcacttctatttgttctcgtgtatctgcagaccatatttgagatcctcagtcttaccacaaccatacccacatagttgaatatcagattgagtgagttatgggagacatttaaagatgaatttgtatacattctccttgtttatttttttctagtggtaatgttccaagactgagacaaacagatatttaccagacctattttatcttattagttgaaaagaaaaaccctgttaaaatcaactttataagatgctgtgattatggaaatgtcctaaccactgctccacctggggcaaagggtacagagaagaaactgtccatgaaggtggagaaaaaactttcacaagggacgatgtttattgggaggggtggggaaaacaccttcctctctgttggaaagtgggagatactgggaagcaattgaaggcttgtttgacatcggtaactccagattggtgctctgaagtgtggactgaattgattctttcatcataagtctgactgtcttatggtgccatattagaccatatttactgagtgaatgaattataaaacataataattttagctttcctcatttttttcctagcattaataaaatatcttcccctgtatgcacagttggaaatcatactaatgttgttctggttttagaaagaacacatgtcagtgtagatgccagaacccctaagtaaaattctggcttgaaggctaaggaaatgatacccaggaaaggttatggttacctcaaagaaatctgttcagcacagaaaatatcacattagattagattctgcagatttttagacctttccctgcttaaactgccctgcaatgtagctgtcagacatcatagccaagccaatgccaaccccacagttctctcctaatcctgaccccatttctagacttaatgctacatgcttttctagcagtttctgataatttattaattacagaaagtagtttttgtttgccagcctgttgagtggatggtgatttcactatgctctacatttaagcttataggcttggtagtttaataaaactgctacttttttgataaatacatttttcctcccatggttaaatgaataaagtgtatctagagtgaaaaagaaatcccaattatacatagcatttttctatctgcttgctcattaaacttatatgcatgtcataacataaaaataacaccctgtaagaaataatctgtgataacttgaaaggaatgcctgtgtaatctaaattcttttgatgctgtctctggcatttaacctgtcattttaatgaaacaattttaattgcttatttgcacatagtgttgtgcaaagtggcttactagtctgtgctttctgggaagtgatgaaagacctgggttggaatactccatgtgagtgaatgtggaaaggtcacatagataataaattaattaaaaatttagttaattaaatatttactgttttaaaaaataaagttatatgagttgtaaagaaataaacaatgcattacccattttgattttcaggtatcggtgaaagtcatcttttgttgaatcaaggagttgattcttacaaattttaggtctgaataatgggagtaagttctctggcaatctgtaaggcagtatttccatttatctgagttcaagatgtgtaaagaaagttcttgtgagttcaaaagtaaatggatatggacttgggccaaaaacagtgacagtaaagtttaaatgataggagcaaggaaaaagattgtacattgtacatatagaataaactatgataatgagtaaaacattattctcagattgcttgaattgtagatcagagatgattataagattggatcgagagttgagaatggagaaggattgcacaggagttccagcttttcaacaggtcacgtatgcacagttaacagggccacagtcttgaagtaaagagggacaatgctgggtagcgaggatggaagacttttacaaataataaaatatgatttcatgcaaagtgttcaaagtagagcatattaaaacagggaacccagagatggtggttaaatagtctccacagtcccacttccttattgggctgagcttcctggtctagaatggactttagacagcattctaacctcatctctttatgtaatcaatgaaatccagaaaaattgggcaagttgtctgagctcctacaactaattgcttgtaaagttgaagtgagaaaagacgatctgcaagtttatgtagtaaaactcaacaaagttaatcttaaacgaatatagaatgggtccttttcttttaaataactaaaattttattgtgtgcatgactcttatctctttcctgaagtacttgtcctaagaaaaacatttgaaacaagttactttaatcttatctttttccccaacttagatatgagaaaattaagtgtaatcgggaacctctttcattacgatctgaattaggagaaatatctgtttatggccaaacatttttctgcttctagaggcctagagttgtttctagtacagacttaaattctaatagaaaatctccaaataaggcattaatatttatttcataccctgaatgatatctaaggaaaaggatattctcagtattatattgaaaccgatttagctttttctcctaagcagttacttaggaggaaacttaaatagttgtcagtggtagtactgacttagcacagacatttcagcaacaggaaaatacaaataaaagagaaatgtaagtcttagaacctagttctatggatgcttaattctcaagaactttttctttgttttgatttaatacatcccctttaaaatcaatactcctaaagtatttattactttatcctaaagcaatatttattaatttattactttttcctaaagtactttaaaggtacttgtttcctcccagtgaaggaagaatgctccattcttaacctgttctctggatccctctcctaccccttcagaatccattgaaggtttctgaaccattataacatattacttgtgtgtctgtgtagccattattttactatatcttattatagtttatgtatgaaatttgaacgggggacagggaatgtactttaatgataagttagaaggcctttggcactttgcctgaaataagcacctatattttttgtcttatttttttctactctaaagtcctttgagcgttattctttctttgttcatttctagataggactccctactcttgcccaatgtgtcacaggagacattttgtgagatggctagctgaagagcttactgtgtgacctgagtggctgcaccaccctgcacccagtactctcttttgtggaagatctgttcctcactgtcatatgtgcctcacctgacaaatgtcaaatgcatgtcctttcagaacacagtcactgctctatacctggaaaactgctatagtccataaaattctgctgtctagataaaatacatggatttgagacccagcccaggccctgacttatagtacgttgttgggaaagtcaattaatacttacattattattaagagagctcaatgagataatgcctatgacagcacgtgtaaactattaaacatacgaaagacaaactttttatattaaactcctactgagagttttacctcttagagaaagggattttttttttgtcctgattttcattaaaaccccaagtgtttgtgggctaagtactacttgtaatcagatactaccaaaataattccatgtactgtactattagaatgtcaacagttttatatgttttcctttgagagatcaagttaagaattgccttgaaatgtcatccatcctaggaaattttagtacctctaaattctttatccaagatgagaaatcatctttttattattgactgttcatcatgtggaaatctgtcagacctatcaaaagaaccccctttacacttttctattctaaatgctaagcaagatagctttctgttctgaaccccccaaaaaaagaaaaaaaggcagaggcagtttaaattctcctgaagcaaatatttgaaagtgaaaagataggtgttaaatctatatttgaagatttcctttagtgttcttgaagaaataattaatgatatgctgccctagtatgtgtaaaaatataaactgtgcttgaaacctgatgttatataggaaataatcaagttcttacttcacttgagaaagctcttcatttattgaaagcggctttgatatctatccaaatatttttaatatttccaggacatgacaattaattttacttatatttttcattctgtgtgtaacatgccttgtaggtcttcatccagttcttaatgaaaatattgaaaagaagattaagcatgcagtcccacatcataccactaataacattatgacagatctccatcaaaccttaaatcaatattccatggctattattgttcagcctacaaatccacttaactgtaattctatccatctcactttatctccattttaacccaaagattgtaatgatagctcaaatggctgggctgaaatcttgttgcattttatttgcgacattcctctaatctaatttttttgaagtataaaaatatctagtaaactttttgttggaaaatgtgaagagatacttttccacagatcacttgcatgtctgcacatcttactgggtatattaagaatgcaagaccgtcactgatcttgacccaggccatttctcagggatgtatctttagtgagcaactctgaaagatgaaataatgcctccctgtatgacagagagtaggcttgcttactgcctgctgtaaaatggcaggcatcccagactcaaagatgacaacctattctgtgtgcaggtatccatctaggctcatccccaataccaccatgctatgctatgaataataaagtcctttgtctctgacctgtgagtatcatgccttctgccagcatccatgaaaaaataataggctagcttattaacttataaacaaggtaaaatcctagacctaacaaagtataatacacagcagagaacacaagtcttaagtatagagcttgaattatcacaaagtgtttacagtcatgttacttccagcctgattgagaaataggacatgactattgaatcctctctcatacaccttcctggtcactcccacccattcctaaccaccttcgtcaccaggggtaagcactttgttgacttttaaaagagattaattttgcctatttttgaactttatgtgaatgatactgaactctctttacatattcttattgccacacatacatcttctttttgaagttccttttgcccatttttattgtgttgcttacctatttgttactgaattgtaggagtgttttataaaacttgaataaaagccagttctgaaagttctggagatccattgcacaacagtgtgaatgtacctaacactactgaatggtacacttaaaaatgataaaaatgacaaattctgttatgtggggttattttaccacaattaaaaataaaaaaaaatttaaaaaatagccaattgtatggtttacttatacttatttgtgtaatgatatattttgataagcaaaagttctttaaaaaaatatttttggatgaagtcccattatcttccccctacccctcttttgtgtggttactgcttttgagtcctaagaaatctttacatactccaagatcacaaatatattttcttgtgttttcttttaggagccttatactttagatctataaatcatttgaaactaatttcacctatgatgttaccgagggggttgaaattatattttccccatacagttatatgtagttctttcaactatcaattctttaaaagacttccctttcctcattgagttgcttcggtgtctatgttataaatgaattgtgggtcatttctggactttgtctgttccattgatctatgtaattatcctgaaaccaaaaaccgtactttcttgattgaaactttgtagtaattcttaaaattggatagtcaaactcctcacagtttgttcttctgcaacgttttttctattgtagatcttttatagttctatggaaaaatttagaagcagcttgtcaaattcaacaaaaaagcctcctgggaatttggttgagattgtattaattctgtaaatcaatatgggggaaatttacaatattaagccttccaatttatggacttgatacattgttccatttattttgctctcctttcacttctcttagagatattttgtacttatcagtataaaggtttaaaacatccttctttaaaatttctccaaagtattttgttatttgtggttataaaggatgtttttctaatttacttttcaagtatttttttctggcatatagagatataattgatattttgataattgagtttgtattctgtgaccttcataaattcactgttctgccaaatctggtggattttttttttttgtagattttttttcttattttctgtgtactcataattttctgcaaagagattttacttctttcttatttttccatttttttctgaattatagcactgggatagatattcagtaaaatgataaatggtaagtagtaagtgcaggcatccttgccttggtcctgattctgagagataagtgttcaatattttaccattaagtatggtgatagatgtaggttctccataggtgttccttttaggacctaggaagttctattctttccctagtttgcggagagatttttaaaaatcattagtagatactgaatttgtttaatgctttcctgtatctattgatacgattacatgatttttctccttttccccttatgatgttgaattgctgtagattgatttttaatgttaaacatttactgggataaaacctacttcatcatgttgtgttaccttttcaaagtattgctgcattctattaatgatatatattgtgcttataaaatttgtcaaatgacattgttttataatttccttttcttataatatccttgtaaggttttagtatcaaggttatacaggactcataaaaacagttagaaatattttcttctccttttctaagaaaatttgtatatgattgattctatttttttcttaagtattttatagaatttaccaatgaagccatctggacctagagttttctttataggaagtgttttagctacaaatttagtgttcttcacaatatgggctatttaaatttttttattttatcttgtgttcactttagttgtctttcaaggtatcggtccttacatccatttgtcaagtgtatgccataaggttatttatcatatcccctaattattcttttcccatctgtagggcctgtaaagatgtttcatctttcaattctgatatttgtaaattgtgttttctccccttttttggtgggttgtgggaatggcggagaacagtcttcctaggtgtttatccattttatttaatctattaaacaacttttagcttttttttataatttgtttctcattgttgattgctgccctttattatttccttcttcctactttcgtttaaatttgccttttcctgccttgctttgtcatttagaaatgtatgtagattaattttcattcctatccttttctgacataagcattgaaagctgtaaatttccctcctagcactgtttagctatatacaataaattctgattatacttcagtttgaatcatgttctaatttttcttgtggtttctttcattcttgtcttttctttccatgatatattagtttgctagagcttccatacaaagtaccaagtgacttaacaaaaatttttttcccataattttagaagctacaaatttaaaatgtcagcagagttggtttcttctgaggcctctcttcttagcttgtgtatggtcatcttctctgtgtgtcttcacatgatcttccctttgtctgtgtctaatctcctcctcttataaggataccagtcatactagattagggcttaccctggggacttcattttacctgaattctctctttaaagaacctatttccaattataattacattctgaggtactgagggttaggacttaaatataataattttggagagacaaatttcagcccataacatatttgttatttaaaagtgtgttgctcaatgtttgaatatttggacattttcttgaaacctctttgttattaattttaactgaattaatttgaggtcatatgttctgtatgacttttattctttaaaatttattcagacttgtttaattgccatgcacatggtcctttttggtgaatatttagtgcacacttgaaatgaatgtgccttttgtagttgttgagtgtagaattctatgttcaattatattgagttggttgataacatactaaaatcttctaaatctttatttccctttgctctacttattctattaattattgagaaaaagtttgtttaaatatccaacactgattatatgtttgtctttttatcttaattttattaatttttcttcatttatttctagaagtttaggctatcattttatatttacctctgcttgtgtgtgtttttttaatctctgaacatattcttggaggtataatggggttgtcattgtaatcctcattggaaaaaaagtttccaatcctcggtgcactttttttttggtttttgttttggtagtgggaggagatttatttgcttattttgcctcaatgtatggactttaaatattaatcagcctcaaaaatttcatgcaacatgttgtatgtatgtgtaagcatttgagtagaatatctataatttttatcacattcttaaagatgttcatgattttacagaatatagtaattattacctgaatttctgtcccagggacagtccctgaatgtttcaaaatctaattttataaagtattataacaatgttttttagtaattggctcatgacccattaataggtaatggaatgaatttagtggttttcatatgcatttacaaatcaaacacagtaggagacataagaatatattggccatagtaaatctttctttattaatatttcttcagttttatacacacaggagtatttgcacttgggatcatagtgaaaaatgtattacatattacgggtcatggccacagatctagagagaaagcatttgattctgaattggtaggttcccatttgcattgtttcttcttttgtttttaaaacctaggctgaacttaacagttatatctcctaggcttatcatttggaccaggcagtaagttgctaatctaattttcttgtttgctttttggttccacagtagttttctctgtctttgtatttaaggtactaaattatttaatcattttttaaaaagatggaatgttatttctgataatcaataatgggaaatatttaagcaggcattttcctccctctcaggtacaaatagaatcatctaagtagcatcagaaaatttttaggtgaacagtattccagaaatgtggtttggttgagcattggggttgaggtgagaaaaggaagagaattatctgctgattgcaaagatacaaagatgaaaagtattatttttcttacatagccagtaattgaggaagtcaaagttttattgttctaagattattaatgctcttccatatgcataaatcattaagctaaataaatccttttataaaattaagagtaagttatataaagggctaatttgtttatttctggattacctactaggtagtaccctatcccttgagtcagccagtatcattcaaggggaattatagacaattcatataaccccagatggatgaagttatcaagacctccttaaaaaaagaacagcctcttatagagaaaactattaaatgaagatacctgcactgagacatgtggttcatctaaagaaaaaggtattaaggatagtgactcacaaagttaagagagattctgcaataggctaccctagatttctgaggagtgattttcaaatgtgtataatataatccctaaagagtgaaaatggcagtttgtatttggcatggaaatagggagacagtcagactttgttgctttagttgcagacagtgggctgtgtatagggtgggtggcagatctatgatctcactgtatgtatgtatttgtctataaatgtatcagcttcatcacattttttagaaattggtgaagccacctttccagctttctctttgagaatttttttaaaatagtactgttgaaccctggtagagaaaacacatagtgaaaagtgaaataccactaagatggaattgttacccctttcacattttttgaagcattgtaaacaaatgctgaagtacaaagggctgactaatggtttttaccactgactttaaggagggcagcatctcagtaagaaatgtgaaaatgatgaagtgctagtgccttgtagcatactggccaacattttgtaagtcaaaagtgagaaaggagaaggtgaaatcagcaagatggcagaatagaaagtctcagtccttgatcctctactgagacactgacttaatagcaatgtatggattaaaatactttatgagaactccagaaaccagataagaagttgcagtacactgggcaagtacaaagccaagaatagccatcttgaaatgagtgaaaaaagcagtttgactttactaagccagcatagcttagtgccaggagcatatttctcagcttgcaatttctcctgggtttgaggaagagaatgaaatgtttagccagtattccaccttttcagagatctccccagagaactggtttctgtctcacctgaccccaaacactgatgaaacaagcatagattagatgcctgaatccattgaaaacaagggagagtagaagtggcttcctgtggtaccaaaggacctactgtgctgctgagaaagtctggcttggcttagtgcctttcggaggaagcacccaacttgtggtttcttcttcaggagggaagaagatgagtggagtgtgcatccagtattctggttttttggaggtctgtctgaaggactggtatctgtgttgcctactcaccactgctgaggagccaatggcctttggatcactgggggcactgagaaccaaggagagcagagtgacttgctgtggcaatgccacagaacctgcggtagtacagcagacagcaaatggagtgagagattacaagctcttaaaaaagacaactgcaaacttctctaggtgggaaattacatgcacaatctcaagtcacatccccccaaaaagagttcagagattccccaaatatctagctggactaaatggtgtatatattcctctgtatgaagccaatccataaagatttgtagtggtggctgtttttgtaaatgtacaaacttagcaaaaaatcacaagacacatgaagaaacagggaaacatggcccaatcaaaggagcaaaataaatttacaggccaacccccaaagaaacagggatttattaattacctgacaaataattcaatataaagttcagtgctttgcatgggaacacagacaattaaacaaaaaaatcaggaaaacaatgaatgaacaaaatgagaatactcacagagagggaaactataaaaaagaattaagcagaagttctggagtgaaagaataccataactgaatagtaaaatttagtagtggaattcagcaacagccttgattaagtataggaaagaatcattaaactcaaagatatgtcatttgaaattacaaaatccaaggagtaaaaagaaaaacaaatggaggaaaagtgaagaaaacctaagggacttatgggacaccatcacatggaccaatatacacattaggggattttcaaaggataaaagtaagagaaggggacagagagcttggagtgctatattgcttctcttgaatgcttctaggaaaatgtgagaagacagatacagattaaagatgaaatttgtaatcaaaaggggaacagagcataaagatttggaaaattgtcagccttaccatgttgtaaaagaatgggagaaaccactgaaggtgtggttgaaccaatttaataaggaaattagtctggatggaaggaagacagaggctattcatcaaaacaatgcattttggagatcttagaggctgccactcccatcataggcccatattatcaggaccttgagggcagtacacttttaagggggctggggaacccattggaccttggagggtgttttccagggatgcttcaagtttctaatccttgcatcctggtgtagtgttccttggtcaccccagatatggctcctgtgggcccaggtgctgtcctctggaaagtacaagccataaaccttggtggtgtccatatggtgctaactgcaggtatgcagtgtgcacatctgtgaaagcatggatgcctccacccagattccacggagaccctcagagccttgacagataactgccgcgggcaaagagccaccacagagagccccgactagagcaatgcctagcagtcaggggctcagtgctactcctaaaaccccagacctgtagagccaccaacatggaaagccagcttgagagagctgcaggcacccagcctcaacccttgagagcggcaatgtacactgcacatagccaagccatgagtgtagggctacccaaggtctttggggcaaataccccaccctggtgtgtcatgaactttcaggggccaggagacaaatgctgtggtttgaatcaacatcctccctgaccccctggacacacacacttcttacctaagactcaatgtgataatattaagaggtggggccttcagaggtgaataaataaagagggaagagctttattatttattaagaaatttatttattaagaaatactattatgatgtagagtagtgactttataaaaaggctggaagggactagctaggggtccttttttgcccttctatcccttctataatgtgaggacacagtgtatgtcctctccagaggacacggctttcaaggtaccagcttggaatcaaagatcaggccctcaccagacaccaagcctgctgacacctttatcttggagttgcctaaaatgacctaaatgtaagatctgaaagtataaaactgctagaagaaaacatggatatttgattggacaatgatatttggatatgacaccaaaagcctaggcaactaatgcaaaaatagacagggagagtacatcaatcttaaaaaccttatgatggcaaaaaaaaaaaaaaaaaaaaaaaaaaacatcagagggaaaaagcaacctaaagaatgagagaaaagtttacaaaccacatatctgataaaggtttaatatccagaataaataaagaattcctgcaactcaacaacaaaaagtaaaaaacccaattaaaaaatgagcaaaggacttagacattttctccaaggaagatatacacatagataagcaaattgaaagattttctgtataactaagtatcaggacaatgcaatcaaaaccacaataaggtattactttacatctgttaggatggccactataaaaaaagtagaagataaaaaattttggagaggatgtggagaaaacagaatcctgtgcattgccgttataatcgtgaaaaagtaaaactgtgatggcaaacagtatggagcttcctcaaaaaattaaaactggaactaccatataatctagccatcccatttctggatatatattcaaaagaattgaaaacaagattttgaaaagatacggttacacttgtgttcatttcggtgtgattcacaacaaccaagaagtagaggcagtgtaatatccacggacagatgaatggataaagaaaatggggtatatatataaaatggaatattattcagccttaaagaagaaaattgtgccaaatgctacaacatagataaaccttgaaaacattgtgctaagtgaaataaaacagccacagaaagacaaatactgcataattccacttatatgggatatctgaagtagtcaaacttacagaaacaaagtagaatgatggttaccagggattgcaaggaagggaaaacagtgttgttgttcaatgagtgtagagtttcaatcaagtaaaaccaaaagttctagagatgtgttgtacaacaatatgtaatatgttaagattggactgtacatttaaaaattgttaatacagtaaatttattgtgtaaatttatgtggtttttaccacaataaaaaagtgagaaagaagattcttgtttattcagacttgttttaatacagacattcccaactcttgctgcaatgtgttctttacaagtattatttcaatataatatttctgtaatctgatagaagtagttttataattggtgaatgtatttctgatcaaaatctttacgttgtgtaaattctgactacgaccaacacattctcataaatatgaaaatttatgtttttaattatttaaatagtaagattgtatgacattttctgtttttaattatttaataagattgtatgacatccactgatatcattgttttggggatcttaatatccctaaaatatctgggttatgatacattcaatttcagaaaatattgttgacatttgtaaatattttaccctttttaaatttaaatgtatttgtggatgtcattttatctcacatctcttttaaaaatgtaaggaagcttgaattgatgccttctttttttctctgcaggttttactgtagcagataggtatcaaaatgtagtattccattgatttttctttttgtttaaaaaaataccattgtagcatttaagtatttgaagggtatcctggggggtttcgagccaacatattatacatctgactttccttttttttcattcttgcttttacactgtctatcagaggcaactttgagagggataagaagccaaaaatataaaatgagtagtttagcatcaaagtagggagagaggcagacagtcgaacttctttgccttggtggcaaacagtgggttgtgaatggggagggtggcagaggacttatggtctcaatgtgcatgtgtatttgtgtgtaaatttgtgtatcagcctccagacataaaaaattaattgataaatccacctttccagctttttttttttttgagaattaagaaataacagtactattgaactctggtgctacaaaaacagagtgaaaagtaaaatattggttgaaaatagacaaaacaatcataagcattatttcagtgaaaggagctccagctatatggaataattgagtaatacagattgagcatcccaaatccgaaattcaaaatgctccttaaaatctaaatctttttgagggccaacatgatactcaaaggaaatgcccactggaacatttcagattttcagatttggaatgctcgaccaatctgtaatgcaaatattccaaaatctgaaacacttctggtccaagtcatttcatataagagatactactctatctgtaccttagaacagtggttgacaaattttttttataacgggccagataataaaatgttaaggttttgtgggccatacagactctgcaggccatcacaactctgtcattatagcatgaaagcagcaatagacaatatgtaaagaaattagtgtggttgttttccaataaaactttattcacagaaacaggcaataggctggattgggctcaaggccatggtttgcagacacttagccttagaatttcagtaatatcaccaaaatcaccgccttaaaaatgtaagtcaaataaatttagttccctcatcggtaatatgaaaaggctgaattagattatctccaaagtcccttctaatgcaaacattctgagtgtttgtcaaagttgactatggcatctctcctcgcagtttgcatcatgtctggcaagagtatagctgttgtttcttgaacaagcaacttaaaaatacagtgaaatgtactcttttattttacagaactgttatcataactgctattggttatattctcaaaaatcacctgccaaggaaaaatgcaaaaggttcgtgctattctagtgttagcagaacatgaccatcgatgaacctcatctgaaaagactgatgatatttattagaccaaattaggaaacccacacattcagctctgcatttggtctagctgaagtctgttacttgggtagcaagctgttcaggaagtacttttttaaagaaggaaaaggaatcaggaaagccagtatgtttttggagtcattttctgttttttagtatttaatcttcctcatcttgccccacaaaccgacccaattctagcttattactgagtcttttcagacctaatgtttcagtttgtttctatggtttgttcatgctacaagccatcatcaccccactcagcaactagagccctctcctggctaatctccctttctgtgcagcccatctctcataaatataccctatatgtagcagccagtatcctctgctttagtgtttgcatcggtcctctcctcttcaggaacttgtttgggtttatatcctattgtatgaaatctattctgtgtttcatggggtgcagtttacatcagcattcattgtcgtttatatttgtcatatcgatttttccccgtcatttctgatgggctggctaacagccataattctcatcactgctggttaaaaagcaaaacattttaaaaataagaattctgaataatgacataaatggacccccaaaatagttctctatgatttagtatttgccttgattactagcctattttttaacaaataattgaatgtagctaaaccaaacttctcaggaaacaaattggtatcctaaaaacaagggtaattaattatacattttatacatcactgggaaactgatatatcttaattgaataaactctgaagtttgttgaagataaattaagatccctatgattcaatgacaagaagtcattagtggcattgccctgatgatctcttctctccaattacaaattataaattaatattcttgttgcataataatctcactgagtttatgtttagtgtgatcggttcctctgagccccattaatactgaaagaacaggtgagatcaaattttcacagcacagagtagcagaaatctttgagaaacagttgttgaaaataatagccacctatcatctcattaaaagttggctgcaaacaataataaacacttctacttgtttcagatatttaatatatatatttaatcctcaaagtgaccttctgatacagatattatcttatccgttagatatcttcaaattgctaatacagaagatgtataaaaaactctataggctttattcagttaattgaaaaacttagaggcaagtcacactacaggcagtatgtaatttggtggctcaggcgtgtcaccaatggctagtatcttcactcttttctgctttccgtgaatgcatcttaggatgctttcatcctaaggctgccaatcttcacgatattatgtgatgtcatgtttatgtctggttgtacttctttcctggcacttctctcaaaaaatagtttctttcactcttcaagcatctttgcctctcagtgttatctaatcttcttaagatttgtgcctattcctgaaccaatcacttgggcaggggaagagatttcattgattgggctaagccagtctaggaccacccttattactgagggtcaggttaagtcaggttaataccctccaaaatggtagaggggcagtctcatgaaggaaattgggatgaatcagggaaaatagatgttatacagcaaacaccaagtccctactacaaccctttctcatttgttttttacaaaataacaacaacaataatagtaatagtataaatagtaaatagtatttgtaacagtatataaatatataataaatatataaatataaatatataattatataaagtataatagtataataaatagtaatagtatttattgtgtgtactgtgtgctaggcacatgcttgatactttaaatacattttagtcttcaaagccgtcttgagaaataaatggtattaaatgtctgttttccagaagtttagaaagattaaacagttacccaaagccgcatggttaatcagacctaggtcagtctgacttaaatgtccatgtcttttcaccaagtcatgctatctccctagtaaaccataagctgactattaagaacattgtaagtattgtcttagaaatttatcattattatagaattctaggaaataacctatcccattttggtttaatgtgcaacatacccatacagaaaaaagtcttgataagcagaattacaaaaggggtgtgagttatcttttttttgcctactttgagcaccaagatccttattgcaatggtcaggtaggatactgtatgctatatgtatccatatgcatatatacctgtgtgctgcatgtatgaatattgcatatatcacaaattctaagagaggtttttgtattggcacttaatgaaaatgacaaaagaacaagttgaaaaggacaggctctgccttctaaaataactttacagtgaacactaaagactatgtcatctgatatcagccttcagtttgtcacttagtggtgataatcgagtattgtggctaagggaatatctctggcccagtctgagttattttctgggtgtcctaactttagtcccatattctgcctcctggggagtttatttcttgcttcagggttcttaatacttgtacttgcggaaggcttgggctttcaataatgattcataattatttaatttttattgaggtccttgcttccctctagttttctacaaaaagctgactaggcttgtggaatggtggaattgtgttcctttacttagtatttgtatatctgtggcttaaataactataaattggaaataaatttaaaatttactttcctagatttaatgactcgaagcaagaaattgttctaaggcagaaatattgttggattaactacagaacaatcagaaaccccttgtgtatctttgactatgttacagtatttggaaagagttgtctatagctctgctttcctagtactttattttctggacatcacttttcattcattatttaatgctatttaagtgtagtgtttttctttgtttattaatatattatgtactattaaacaatatttggtaatttgttgaataatagtttatttgttaaataatttgttgaataacaaatgtgtgttgggagtacaaagtattatatcaagaagtaaatttttaaaaggcaggaggcagatgataaagtgctaactggaaaaaaagtatcaggattctacagaacaacactggggttatgtcatatgctgcttttaaatcaaattgcagaaaagatcatttcatttaaaagttagtctgtagctcagacagaatactatgtggtttcaaaagcagaagggtacacgttttctaaagcagttacatatatctaacaaaagaattaatatgtgaatattggttcaagtaatagcttgaactaaatattaatttcaagtctattttaataggcattttagtacctattaaagttgataaattagtggaattttacttttcactattgaaatcaggttttgttccgatttttaagtaaagcttgatagaaactatttcagtcatcatcctggtaatttaatatatttggtattctcttaaaaataacaggaaaaaattgacaccgttaagtttatgtttaaagcatatagcttatttgattttgttaatggctcacctaaatttgtataatacttaatctgtgaataagagaaaaggttagaaaagaagaggatatttaaaggagagttaggcagatgtttattttctaggtattctcattaaggaaaaagccactaagtcttcacctctatagcttttctacttaagaaagcatagatccctggtgaagaaagtaaaagaaaaaaatagtctagaaatggcaaataaaatgctaatctctcttttaaaattctggcttaatatctgggggcctaatagagaaagtgggaaagattgtttttagagaacgtatattttaatatactttaactctttttttaatagtgcaataaactataaagtaactaaaaagaaaaataagccaaagctttgaatgttaagagtgaatgcaaagtttatggttgcattagtcagtatggtagtcactgaccatatgaggctcttgagctcttaaaatgtggctagtgcttctaaaaaactgaattttaatttcatttcattttaattgatttaaattaaaatactgatattgattcagtaattggaaaattttaagcatatttggaacatcttgggtatgtgaatctacttttcagctgtaaatttaatgaaatctaaatatagatcagatatttcagatgaaatttacatctaaattgagatgtatcataaatgtagagtaaatatatttcaaagagtgtgattttaaaatgtaaaatatctcaactaaaattttcatattgacatatgttgatatgttttggatatgttagattcaagaaaactatattattaaaataaattgcacggtttaaaaaaactttttaaatatttttaaaaattttttaaaaatgtggctactagtaaacttcaaattactacttagctcatgttatgtatgtcttggaccataaaggtttaagaaggttttctaagacttcactggaatttatttgatacataaaaatacattctgggtcagtgagtaaatcaggccaaaatcatagcatttttctttttctctctgtccggacactgctatcagttatgttggtgtgaatagtctaattttttaagcaatcactgaatctaatagctaatccatataatttacttttttgtaattagcttttataatttactttttacatactcatatttgactcataataatatagttttcatgtggtattagagaaaagcaaattctatagattttagtgaagcaaattggtaaaaacagtgataaaggaaaaagtatgatttttgtatattattatgacctggataatgtacaatatgaaacacttaaagtacttaaacggtatctagaagagattatggtgtctgttttctaatatgttgtgttcttttcatgttttctgttatcctcacgtcaaacaaattgggcaaaaagcatggccaaatgtgtaatgcattttgctctgtcaaatattcctaatagatccaaatagatgataaatgtgactttcatcataactttgtctcattgttcatctatcaattcctctaggaggtgatttcctcacctttctgagaaggaagaaggatgaactaaaactcaaacagttagtgaaattttcattagacgctgctgctggtatgttgtatctcgagagtaaaaactgtatacacaggtaaggagaacatttttaaagcaatttttggttttattaatagaatgctggaaaactgatgtatttgctacaatagaagtcattttctttcatgaaacatgtcttttcttgttttctgtattttgtgtgaaagtgtcctctgctagttgtttatatagtttatacaaacactcctttttcctcttacttgaagtgagtacctaattagacagtcatttgcctactagttagaatttgttttattataatcatgaacaacggtgacatggaatgtactacaatttagtaatataagaaactacagccttataatcagataagattgtttcatgtgttgtctattctcattttccaaagaaattacatatgaagtcatggaaaagcataatagtaaaacagcaattcataacagtgaatttggtcaagggtaaaagattttcagactcatttaatgctcttttggacaaattaatttttctttcattttagtacctcactaattcatggcatcgtattgagaaaataaatactagttatttcaaaggagattttatgaaacttgttctgattgtatgtagtgacctggtcttaatgctttatacattgtggttttagttgcttgtagcgggaattgttttttagtgctaaatgtcagtacaatttatgatctgttgcagaattcatgtcagatcctaaatatggctaagtataaataagcacaatgaagtggagaactgatgcagtttttatgcaccagaaactgtgcataatactgtttaatgtggagcaaggttcattgctagagtgagctgttgtacactttatctaactggttttgttactgaagtatacttttctctgaggggaatcattgtccaggctttgctttaacactctagtgaggttgtataatatataattaaaggaaaacaaagttaccatcaccttaactatacatttatttgatctcaatagatatttttgacttaatttccccatgctcaccccaaattttactcagtgttcagctttattctgaaactataattatgacctgtattttaaatatggttcaacaattgcatatattttaaaattcatttctatggagatatttcttttggaaattaactaaaaataagacattatcattgcatttctgttttactttctatgactgtagattgaatcacatgataagaattgacttaaaaagcatttgattctggataaaaattgtactaccattaatttcattagtggtcaacactgtgttaaaattaaccataaaggttttgctcttcatttggagaaaatctgtaattttggttgccgaggtattgaggtgcttcaaattctctctggtaattactccttttgtctctgatttatttcataccattagaccgcctgtgggctttaaactgtaataaatacacattattgaaactttttttaatttgtcagttaccatgactcttctttaatttctgggacattgcatttgagaggaccattgtttcaatctcttgctactttttgtagtgattattttcttaaaaaatgggtcactgtataaatgcctatgtcatgagaattgaaactattctacattgtagatggcagttagcttttttgaattcatttccctctctaaatcataatattatctgctgtaatgttgtttttcccactttgctttttaagaattttcatgccttcacaaatttttgaaagttaaccctttcttgaccacatatcctagcaggttgtgcatagacctatgccatttgcctactgggaaggtttcccagttgaacatcttgaacaatgtcagtgagagcgggtttgacaaataggtttcaacactagcgccaacttttagtgaatggtagtggctctccctgtatatgttgagaagaattctaggaacagccataaagagtccagtgatcaattagtcacatctgccagggtactcacgagtattaacacacacgccccaaatttgtcatccttggcatagaatatcttctttttgtttttattctcataaatacttttctgacatttaaaaatgtttgttatgacttttccttactagcaacaatataatgtttttctttaatcactttcatttaattcttctaaactatctggtttcttatttcctttgttaatcttgagtgctagatgaattttatgatatctcccaactagtggtcctttgttcctcttcagactcattaaatgctcttttggatacattgtttttttcattttagtacttcaccaattcatactattgtattgataaaataaattattctttgtgttgagtttttttatagtagtgaattgtgctgtagaaccctgttcctatgtgccagcctacatagttctttctttggaaatagtagttgcaatagaattttacttgatgtagagttaagacatagattatgtgtttttgctcctaagaaatatgaaagaaaaaaaatataggatttactacagtgaacagttttttcctcactgaaaaaatttttaatgaattaaaataatgtaaaacatgattgaaagttccctttagtttttcaggtaatgaggaaaggttctaagtctcatttttatatgccaaaacataacaaaaataaatgcatgtctatgaattacaaagccaagctttgtgtccagcaaattctagcaaaaattttaaatcttctttaaattttatatgaatttacaaattttatcctgttcactgacgggaggtcactagaactcagtatatagttgaaaatatttccaattgtctcttcccaaaatagtgtttttaacttttaaggacacatattctttctttagctttgttttattgttttgatatgagaagagcagtgtttcattataggaaaacaattatgacaactataaaatggaaagaggttactgcattaagaaatgacctgcatttggaagtgttcttgttgtaatttccatttaacttccagaagagttctcttgctacaagtttctagtggaaactatttctgtttacagcttgaggattgctgtatagttggaattttgggttagttttaatcaacggcattttatttaaaactattctgtaggccagtgtgaaattttctttcctacttgtactttatgaactgtttgaaatacactgataaactttgtggtgtgtgtatgtttacttacaaaggtatgttactagattgttagatgtcatctgtaaagaatactctgattttgaagttaaggggagtcaggattgacatacttgatattaatggtaatggcattcatttatggttttattcttgatgaatcctactgccaaatttgtttttattcaggtttatttctaaaagttggctttgtgccattgttctttgatatcttcagaaagtaaaaggaggacacactttttattgccatatacttgagtgaaagcccacaatttatggggagtttggggaacatttcttaatttcgtatgtcattgtcaatatcagaaaagatatattttggaggggttaggtagaatatgatttctttttctaattttcaactctatactgattctcttcatgtttggttgctctaacacagtgatttttgtttatcatggagtaagctaacaactttacaaattaaagtatattagaccacatttattttattaatcagtcagagttttgcttatgcattgaagacattgatatttccagtgtttcacaaatgtgggcagttgactactctatgccaggggctaccaaaatgaagattatagtcactgccctcagatggatagaacaaaagttaacaataatgcaaagagatagtcaattttgtgataaaatctacagaattctttgggagtaatatcaagagagtctaatatgacctgtcagtatggggacgatgatgggaataatcagggaaactttgcagaggataccctctgagtgagacttggtggatgggtgtgtcactgaatagaaggagtaagaagattccaactgaaggaaaattgaaagcaaagttacaatgctttgtaagagagagcttgacttaattgtggacattttgttgaacgaatatgaattttaactgaaaaaagaaaactaatttgaacaaaatttacaaaaccctaaaaaatgtataatctcatgaaaatgtatatgagaccaatatttttttttcttttttttgaaacggagtctcactctgtcgcccaggctggagtgcagtggcgccatctcggctcactgcaagctctgcctcccaggttcacgccattctcctacctcagcctcatgagtagctgggactacaggtgcccgccaccacgcccggctaatttttttgtgtttttagtagagacagggtttcaccatgttagccaggatggtctcaatctcctgacctcgtgatccgcctgccttggcctcccaaagtgctgggattacaagcatgagccaccgcgcccggccaagactaatattattcttaagcttcattgggaaaactaatttaggaaggctaagattgccaggaagagagtaatattatatttcatttatatattctagaagagattgccttgtccagtgatttctaataaggattacctatgtgtacttttttagttaaatgtaagatactgcttccagcttatatttgtgtgtgtgtgtgtgtgtgtgtgtgtgtgtgtgtgtgtgtgtgtgtgttttgagacttcatattttattaagtaaaagatttggtatgcttctgaccatttacatttttcccgatgatctttgaggatttatttctctatttttgtactgaaaatgattacctagtgtctgagcttttcctaaactgtgagtatactgaaaaagtattttgtccttggtgcaccttcaaatcatttaaatggtaaaataaagacaaaataaataaaaataaaataaaatgttttctgtgacgttttgaacccttcatcatttctgtcactcgtgatctaccatatactcaattgaaggcactgtaagaccactttaagtaactgagacccagagagattaaaggaaggtcacctaaacaattagtggctgggccactgctaggtcctaaatgtgctgactccattctgacacatttcctgtaattccagtgccagtgttttgctctgtctcattcaagtattagtaaccctaacagctggcatttattaagggctcactgagtactagacacagttcttctaagtgctttagatgcaatgtctgagaatgtcagcttcctgagatcagtgatttttattcatatcgttcactaatggattccaaaagcctggaacagtgcctagcaattgaagctaaatgaatgaaccttcaaaacaatagcggtactattgtttaagcccgttttacacatgaggaaactcacagttagggagtttgagtatcgtgcccaagatcatattaaaaacaagtggtagtttcaggatgtgaatctcagcactctggttctaaggccacacactgaatctactctactgccttgtacaacagaggtatcttctgattacctaggaaagtcaaggcagaaggccgaatggtatttgatgtgatgactaagcttatatttaacatctgcactctgtaatgatcatgagcaaaaacagaagagggttctgaaggctgtgaaacataattttagaaagacaaaccaagatgtttttatcatttaatgaacagttgctgaaatgcaggagcattttgttgttgcttctctatttaataagagtttgaattttttttcatttttatatactgttgtttagaatgcccccttatgctttatctgttaattaaacacacaggattaacatagagatgtgataatctcagttagttgactaagcatttatgactgattttcttgttctgacatttgatttacaattttgaatatattaagctgtatttttatttttagctttgaaaccaattttgctataatacagagaggactgctcaataattttaaatgtattaagaatatatagtccttctttaacccttttttcctgttacaaattggtatttgtatatgcagtgcaattatcatacaaagataatgtaagtgaacacctttataaaaattttttatcctactgctttattcagggtaaaaatttcccaccactagtttcactcattttaattaaggacttttccctaaagacacatgtgtaatatgtttccaggaatgaaaaaagagaccttcctttatgttagccaattaacatcttggcttgggttaatgtaccagcatatctagctgctactttagaaaacaaaaatgagagatttggagtaaagggtcagaggacagtagttaactatttatggttactggtaggaaagatgcagtatatgcagagactgttgaggacttaagggcagtccattgagcacactgaaagtccttgagagtgagaggagaaggaatgaagggaatagtagtacattaaggctatttcatggtttagttagggctagccatgtcctgtgttacacagataagatagaagagaaaattggctgatgtctcatattcttcctcatttctgacttttttccagtcaattacaataagtacattttggattcagaatgtcaaaaaagtgatcttttacattaaacaattacaaatggttacagttaccatttttcttttagggaatatttgattacaaggaacagaaactaagccataggagtttttcttttaacttttattttaggctcagggggtacatgtgaaggtttgttatacaggtaaactcatctcacagggggttgttgtacagattgtttcattatccacgtattaagcctagtacccagtagtttctttttctgctcctctccctccctccaccctctaccctcaagtagaccccagtgtctgttgttccattcttaatatttataagttctcatcatttagctcacacttataagtgagaatatgcaatatttggttgttcctgtgttagtttcctttatcataaggaaagttatggggttatctcacagaactcaaggactgaaagttcagccaggctttggagttcttgaaactagtaaccgggaagcagtcagggaccaaggcaggatctctttttgtctttccctgtgtgttcatttggagtttcattaatgctttttaacgtgttgctgctcattttccctttcaccttgaagactacattcctccactcctcttgcaaagggccctcaaatgacatttaggctaatataacctgccaggcccagcatctgcaggtaattaattagtctttgagctcaaatttcaaattatggacacaaataattggcccagcttatattaaatgtctatcccaattttaataacatggctagacagaaaagagtgtgcagggtcactgttacctagagctagaggagccaatctcttgtgtgcaaggggatagttctcagatgatggggcatgtactaaaaggcttcaaaagatggctatcgtacactcatggagagctcactgtttgccaagtacattcatatgctcatttaaccttatatttctatgagattggtactatttaatctacatttcataatggaatagattgagccacaaaagagtaagtaacttttctaatgtcacacagctagtaagaggaagattcaggcctattctgagctgatgataaaacctgtgaagtaaagcaaaagaattaaactatgtattagatatatttatcattttcttcccttttgtgaagatgatcagccatatggatatccctcttatgaagcaaacttaaaactaataaatgctgatttagagaaagccttgttgtagggagaagagaatcttttatagatcctatctctgtattttcctgggatgattcattccctcacatttcatgtcacagggactgccagttggtccattcagtctccttaaatcctatgtcataccaagtccatccaacaggcaggagatcaatctcagtacagtggaattgggttcatgattatctccaaaacttggctgaccattggttcaagcattgatttgagaattcatgttctcaagtcaaacctgatttatgataaagtaactcactttttctagttagtcttgatcaaattctggggaattcatcagaacatagatgacgcagaaacaagtttgaccttctggcttgcaaattatctcctactttctggcctccaaggcaggattggagcaatcaacatacagaactagagaactctagctggacattgactctcaattttaaaaattactgggttctttgcccaattattgttttaaaatattgttcatcattttattaaatacaaaagcactacaagaaatccttttcagtcccaggcttctcttttaaagtgttctgtgccagtctggactgtttccatccacattgccaactctgatatctattaagtgtaagcatttgcagagcagttagcagcttcagcatcgtggctaagaccaccgatttgaaactggaatgctctgtgcatgaatcctaggttttcaacaaattagctgtgtgattttagacctcccctcctccccacctgggaattccctgtaacccataacctgttttattttttgtgatagtccttactatcacctgtttattttatttatataaacatacacatgtatgtgcatatattcacatgtatatatgcttatgcatgtatttatatagacacatatgtaaaataactggtttcctttttattgcttatctcccccaactccccctcaagttccatgaggacattgactttattttgtccattacttagtactcaatacagagcttctagtcattgctcatcaaaaatttgttgaatgagtgaatgaagttacttactatgcttcatttcttccagtataaaatcaggatgataatattcactccagtacactgattcaggttagagaaggcaaggctacttaagtagcaaaggagtatctgaaggctttccactccccacagcatctcagggggaccacaacttaagaagaaaccacacacgcccataccattttaagattagattaagttgtctgtttagctgaagatacagaaatgttccagaaaaagatagccacataaagcaagagcaaatgcacgatatttcaattcaccttaccatggtccccagagtttctaatagtgacactatctaaaaagggtagggccttgttgaatctgagatgctcattttcttgctaattatactcccattcagggtgtacttatacatctatgtaggtttgttgaatgtaaagttttaaacatagggctatactggtttttgtgccaaatccggtgttaacaaggttgaatccttactctgggaaaaatgcaaagttaaaggcgggctgtctctaggcactgtatctctgactccactcatatctccatagtctgctacttcactttcattacccctttagctaagtgttaccaatactgagtatgttttggccaagcattcttcaagattctctggctacagtgatgaatgaaacaaagctctacccttagggaactttagtaattggggaaagtggataataaacatatttttaaaaaataataatcaaatataaaatagtccatgtgttaaaaagtgatatagaggataataggacaaaagagaaagggatggtggagatgggcaccattttatatagggtgttaagagaagacccaaaggagataaaagagtgagccatgtgaatatcagtgagaagagccttcctggcaatgagcattggaactgcaagatagaacagagacaggggcatgctaggtgtgtcaaagtaagccagcaaggtcagaaaattaggtgagttgttacatggccagatcataaagttcttgtaagccattgaaaggactgtggcttttagtccacatgaggtgggggtaattgatggcaatttgatctgttccaggtttatgaagaatcagtggaattcttttttatatattttttaattttattattattatactttaagttttagggtacatgtgcacaatgtgcaggtttgttacatatgtatacatgtgccatgtttgtgtgctgcacccattaactcgtcatttaacattaggtatatctcctaatgctattttgtaattctaacaattttaacgtattactccatcaaactgtaatgagccaaatgaaagaaaaacataactcatagcttcttttctactgggacgctactatatgctgactgctgtgctactggtgatacaatcatgagcaagatggacagagtaccattcctcctggcattgttttatcacactatgtaattcttgtaatggaagaaaaatgaagaccttgaaattaatggcactcagagtcttagctacagttttttatatttaaattggacatatgtttcccaaataagttctagatctttagaagtatactttgttaatagtatcctagttcatagacccattgattttgagagataagtaaaattaaatatgtgtataatttatagagggttatattttccatctggggtctctggttttatgacttgtaaatgaacacaggtaattattatttacctaagtgaataaccgtgttgttgctagttaacaaaaacaacagatcatggctaatttttggagaatcaatgttatctatagaactaaggtgacatgaaagagaagatgtcatttatttgctattatgtttggtataaaaaaaggccattcccttctaaagaaagattatgtactctaaagcaaaatgaactctattgtatagattggtgcaaaagtaattgcagtttttgccattggaaataatggcaaaaatcacaattgcttttgcatcaaccttataataaaaaattctgcttcattagttcattctcacactgctataaagaacttcctgagactgataatttatgaagaagagaggtttaactgactcacagttccacaggcttaacaggaagcatgactgggaggtctcaggaaacttacaatcatggcagaaggcgaagagggagtaagcactttcttcacatagcagcaggagagagagagacttttaaaccatcaaatctcataagaactcactatcatgagaacagcatggggaaaaccacccccatgatccaatcacctcccatcaggtcctcccccaacattgggaattatgtaattcaacatgagattagggtggggaaacatagcgacaccataagaaattcttgcataaaataacttagaatggttactgtttgtggtctggtgtgcctatttttacttcttatggacacatatttttattatagaacaaaaacacctgcttattatgctcttaaattaaccttttaatgctgaacttcttttattacacagttttatttgctttttgtggggaaagaagtaatgcaaatttaaaagagggttataatgttaacctacctcacagtcactgtttgtttgtttttttttaggttaaattaaaataagacatagataagttttgagaaaactaaatggcagttcaaattatagtagtattaaattattatccagttgtagatgaagagggagttagataccaaggtatattagaaaatgaaaagaaaacaaagatagctgaaggaataaataggttgaagaaggtgcaagttaaaaaaggtttgaatgggataaatgtagatggtgatcattattctaattaagaatgcagcctctctatgtatccactataaagggaccctgtgtcaactataatgtagctgaagtaaaacttactattggcatccagtgctggtcatctcagtgggccttccctggtgtgggccactgcttcaaagcaggctctgagagagatcactatgcccggaggttttggctgcacctctctcactctctctttctttttcatatttccatctttaacattttatttacttggaagaaaaatactgcaacattaagaaagttttagctggtgtgtttcgaccttagttttcttgtctttatgaggagagaggggaattagcttttttcccattatctttattaaatcactgttttagagtttatttgaacccatattttgaaacatttgaaaactgcttaaaaatgaatgtctaatgcagaagggtcactgcagtttccagcagtgcatcttataacttcctattcttgatgctgttagtctgcatcctactgaagaagagtagacagctttctgatctgatatatcaaatatacagcctcttctcagtagtatgaaacctttgacattttcatagatatccatgccctctcgagtcatctgtctttcctaatccatctacctgtcaagctgtcttttccaatgcaagaaaaagtggtcatgatctaaaatcctctaggttttgagaaaagataagaataggcttccatcactgctgaaactagaaccaacctgatgatgtcagaataatacagagttcatcttccacaattgctcagttaatagtaacaggttaataatatgaggagggcttgttaagtctttgctgaagtgaaaactgggtttttcctgcctgatcttgatctgtcctaggaacttctgcttacatatctatgacttgaggacatcaggagtcccacattaagcagcgggaaaagatacagaaaaggtgtagactatatatacctactcaaatatatttctttttctaattttttaaacagtaagaagcaaaggaaacaggatatttcaggaattattttatattactggatgaaaatgtctgagaaccactacttttaagcagtatctgtggaaggaaagacattctcttttcacttcttggggcaacagaaatttacttacatttttcataggaaactcttcaagctactgagttcttctgaagttgtttaaatattgttgctttatgtgtccatgcatacacagcgcaagccgggaacctcttgaagggtggaactatattcatgttgaggtattatcccccttgcctagcactatgcctggcgcatagtatggctgagtaattcatggacaaaagaattaaaggtaggttaagtgttaagaaatcttaactttttgcagcacaaagtatgttttacctttataaatgcttactcatggataatgatatttagtggaaaaagtaaatttccctaatttgctccaaagagcatatactgaaaacattatctaatgttaaatcatttaatatgtaagggaaaagccatgggaaataggcaacagatgaaacaagattaaaaaaatagaaaactatatataatcaaggccttaagaatggcttttctaagctattgcccttacgctttctaagtaaatgtgataatgatgattggtgctaaagtgacattcttagaattgaaagtctgtgtgtccactcagtgaactgtatattggaagtgatgggtacttacttccccactcactgtactaatccctcactctaatgtaaaaggacttgattaatttcatttataagccatgtcttttgtaactactctataggcaaatggtgattgtagcatacccaggactaaatttaatatgagtaatttatttcccagtagctatcaattattaatttttcatttatcacttttgaattgtgaaaccctgcagatgtttgagtagaaagaagtaaactttattcaaataataatatttaataaagatattaaagtcaatggtgctgttcttttcatttttatatgctaatatcaagacctcattgcttatgaagctatctataatcatgcagggttttaacttggaacttttgaggataataaatggatgagaaaaaaaatgattgaacccttgctctgtaaccttttcttcagggccaaatactgtactgaatattttaggctttctaggtcatatggtttccatcacaactactcaactctcccattctgaaagaagttacagaaaatatgtaaaaggaacatgtcttcgtttcaataaaattttatttaccaaaaaaataaagcagactggatttggatcatgggccatgtttttacagacccatactccaaaatgagaacaaaagcatccctcttctcagcatatctatctttaattttcctttgagactgtgattcaaatcatttccactccccctctcatcagcttcccctcattctctctgtccctattgtttgtattatatcctgttatcttctaaaatgaaggtcttgttttaccaactacttttgttagccattcgagtatatagattgccttcttccttctttccctcctctcttccctccattctaccatccctccctcctccacattggttcttaatggagaagccagtagatattttgttgctaataatgaatttattttaattcttgactgttatcttaggagatattataaaagtaattattttatttaaatttctcaagccctaacatagtagtcgttaaatgcttgttgctaatgaagagtttaacatttttatcatgaaaatttgtaaacatgtaagaccagagagacctgttaggcaaaagatgagaaaggcctaaactatagtagtgataggaaaaagatataaaattaaagactatttaggaagtagaatcaacatgatttattgataggttggcgatggtgggtgaaggtgactcctaggtttctcagatccaaattgaaaccaggtattttccaagtaatactgccatacctattcaccagcctaggcagttctaagtggaaaaggatttgcatggagatagcaaagtaagtggtatcttatcttaactaattatctctacacctaggagaatttttatgttcgtttataataattgttatcttatcctcaagttattcaacctaaaattatgtaaatagttcaagttatttttagacatctctgtaagtaagtttcctgctagtaagtttccagacagattttgtgcagtttttgtttgtttgtttgtttgtttgtttgtttggcacgactcctctgttctttcagaaaaatcagaattttcagcttccaattgttttgtggtttttggtatttttatttataaacttggtagttagatgctttctgtttataattcaaaattataaaaaatcacttacacaaatactactgtaaactctttccttttcttcttacccctctcctccttttctcaagccttggtctactctgtggtaggcgtagtgttagttctaacagagaattctataataaataaaaatttattttccatcaggaggtttttcatataaaagaagatgtgagacatacacattcaaccagaatatataataacatgaaatgatgagataccaaagaaattaaagtggcttgaattggggaaatatttctttcaacagattggatacatgaactcaaagggagtgtgctgggggccttttctgagttacggtctctatgctcccttggccaccttgctctaatggtagcagtgtcccgaagaggtcgccatgcttccaaaaatctgtaacctatactgggagatggaaacctgtgaaatgatgtttgccagttttctttaccgatagatgttgaaaagcaatgtagtagtactgactctagacttcagttataaaagaattattttatctatagtctttgtttaaaacttgtttctgttgcttcatagattttctcttttccctttttatggagaatgctctgtcagattattccccccgccaaaaaaaaaaaaaaatgaaaaaaaataacagtgtcaatgtattgcttcatttctgtttgaaagtatattttgacaatgtgtatgtcatctaaaatgttaaggaatcaatgattctttcagttctaaagcccacctggtgaattaaaccaaatctgcatcaagttattcatttaaaatgttgctattttgccttattctctttacatgttgcttgtgctgatgtcattgattataggctgccaccatatttcgagataattgttactgatgcagcctgtcttcctacacataaaacatttgcattgcattttgccttcaggatgtcactctttgtaagtaaagacaaacatagtttgaagacaaatggcatttttaaacataatgtcattttccactttttgtatgaatgaaaattatcagcagttcagagtaaggactaaagtgaaatgaataataaatacgtatttttgtgattatgctttttaaaaaggccaaagaacagaatatgaatagaatttttaagtttatgattttgctattttctgtcatatgtgtcagaattttggaagggaacctttcgtgagacaatttgtccaggcttttagctttccatttcatctttcatatgagattttacctttattttaagggactttgttggcactacttattctttctcagatataatatgttaactccattatacttaaaatgttacaattcagaaaggttctttttctttcaggaatacattctagaatggcaaaccagaaagatttaattatctttaccattaaatgtttagtctacttaagtctatttctctgtacattggatgaaatcattgtataagattctgtgggtcagaagaaatagtgactacagaacaataattcatgtgttggtaattctctacaccctataattccactatttcatgtgaaacagggaaatatcaaggtcttataaaccataaggacattgtcgtgtacttctatcattttgtgataaactcatatcattcttatgtaaaataaggcttctggaaataagatttgtatgcctaaatttttataataatttgctgtatattattttgatctcttccctggatagtgaaagtcattggtagcttgatggggatggcattgaatctataaattaccttggacagtatggccattttcacgatattgattcttcctacccatgagcatggaatgttcttccatttgtttgtatcctcttttatttccttgagcagtggtttgtagttctccttgaagaggtccttcacatcccttgtaagttggattcctaggtattttattctctttgaagcaattgtgaatgggagttcactcatgatttggctctctgtttgtctgttattggtgtataagaatgcttgtgatttttgcacattgattttgtatcctgagactttgctgaagttgcctatcagcttaagaagattttggggtgagacgatggggttttctagatatacaatcatgtcatctgcaaatagggacaatttgacttcctcttttcctaattgaatgccctttatttccttctcctgcctgattgccctggccagaacttccaacactatgttgaataggagtggtgagagagggcatccgtgtcttgtgccaattttcaaagggaatgcttccagtttttgcccattcagtatgatattggctgtgggtttgtcatagatagctcttattttgagatacgtcccatcaatacctaattcattgagagtttttagcatgaagcgttgttgaattttgtcaaaggccttttcttcatctattgagataatcatatggtttttgtcgttggttctgtttatatgctggattatatttattgattttcgtatgttgaaccagccttgcatcccagggatgaagcccacttgatcatggtggataagctttttgatgtgctgctggattcggcttgccagcattttattgaggatttttgcatcaatgttcatcatggatattggtctaaaattctctttttttgttgtgtctctgccaggctttggtatcaggatgatgctggcctcataaaatgagttagggaggattccctctttttctattgattggaatagtttcagaaggaatggtaccagttcctccttgtatctctggtagaactcagctgtgaatccatctggtcctggactttttttggttggtaggctattaattattgcctcaatttcagagcctgttattggtctattcagggattcagtttcttccttgtttagtcttggaagggtgtatgtgtccaggaattgtccatttcttctagattttctagtttatttgcatagaggtgtttatagtattctctgatggtagtttgtatttctgtgggatcagtggtgatatcccctttatcattttttattgcatctatttgattcttctgtcttttctttattagtcttgctagcggtctatcaattttgttgatcttttgaaaaaaaaaaaccagctgctggattcattgatttttttgaagggttttttgtgtctctatctccttcagttctgctctgatcttagttatttcttgccttctgctagcttttgaatgtgtttgctcttgtttctctagttcttttaattgtgatgttagggtgtcaattttagatctttcctgctttctcttgtgggcatttagtgctataaatttccctctacacactgctttgaatgtgtctcagagattctggtatgttgtgtgtttgttctcattggtttcaaagaacatctttatttctgccttcattttgttatgtacccagtagtcattcaggagcaggttgttcagtttccatgtagttgagtggttttgagtgagtttcttaatcctgagttctagtttgtttgcactgtggtctgagagacagtttgttgtaatttctgttcttttacatttgctgaggagagctttacttccaactatgtggtcaattttggaataagtgcagtgtggtgctaaaaagaatgtatattctgttgatttggggtggagagttctgtagatgtctgttaggtcttcttggtgcagagctgagttcaattcctggatatccttgttaactttctgtctcgttgatctgtctgatgttgacagtggggtgttaaagtctcctattattattgtgtgggagtctaagtctctttgtaggtctctaaggacttgctttatgaatctgggtgctcctgtattgggtgcatagtgtttgtattaatttacattcctacagatagtgtaccaagagttcctttttctccacatcttcaccagcatttgtgattgcctgtcttttagatagaaatcatttcaactggggtaaaatgacatctcattttagctttgatttgcatttctctgatggtcagtgatgttgagcaccttttcatatgcctatttgccatttttatgtcttcttttgagaaatgcctatttagatcttttgcctatttttaaagtggatcattagatttttctttcctatagagttgtctgagctccttctgtattctagttattaaccccttctcagaaggatagttagcaagtattttcttctgtattatctcttcactttattttctttgctgtgcagaagctttttaacttcatttgatcacatttgtccatgtttgctttggttgcctatgcttgtgaggtattactgaagaatcagcccaatgtcctggagagtttccccaatgttttcttttagcggtttcacagactaaagtcttagaattaagtctttaatcggctttgattttatttttgtatatggcaagagatatgggtttagtttcattcttctgcacatggatctccagttttctcagcaccatttattgaagagactgtcctttccctaatgtatgctctctctgtcaaaagtgtgttcactgtagatgtatggatttgtttctatgttctctattttgttaacaatggtctttgtgtctatttttattgccagtaccattctgttttgggtactatagctctgtagtatattttatagtcaggtaatgtgtttcctccaattctgttctttttgcttaggaaagcattgactattctgggtcttttgtggttccatctaaattttagctttgtttttttctgtttctgtgaagaatgccgttggtatttagataggaattgcaattagtttgttgattgctttgggttgtatggactttttaacaatattgattccttcaattcatgaacatggaatattttttcatttttcgtgttcaatttatttcaccaatgttttatagttttcattatagacatcttttgcttatttgattagttgattcttagctatttaattttatctgtagctgttgtaaatgaaactactttcttgatttctttttcaacttgtttgctgttggcatatggaaatgctactaatttgtgtatgttgattttgtatcccataactttactgaatgtattttgttagttctcatagtttttggtggagtctttaggtattttcaaatataagagtatatcatcttcacacaaggataatttgactttttcttttccagtttggatgctctttatttctttctcttgtctgattgctctagctaggaattccatactatgttgagtaacactaatgaaagtgggcatccttgtcatgttctagatcttagaggaaaggctttcagtttttccccattcagtattatactagcagtgggtctgtcatgtatggcttttaatatgttgaggtatgtttcttctgtaccaagttttcagagggtttttatcatgaaaacatgttgaattttgtcaaatgcaatttcaacatcaattgaaatgataatatggtttttgtcctccattctgttgatgtgatatgtcacattgatcgagttgcatgtatgttggaccatcttttcaccttgggataaatcccacttggtcgtgatgaatgatctttttaatgtgtcattgaattcagtttattcttactttgaggatttttgcatcaatgttcatcagggatattgacctgtagttttctttttttgatgtgtctttatccggttttagtatcaggttaatagtggcctcatggaatgagttgggaagtattccttcttcctgtatttttggggggcaggaatagtttcagtaggattaatatttttctttaaatgtttggtaaaattcagcagtgaagccatcaggtcctaggattttctttgctgggcgattttttataatggctttaatctcattacttgttattggtctgttcagaatttggatttcttcatggttcaatcttgataggttttatgtgtctaggaatttatccatctcttctaagtttttaaatgtattggcttatagttcctcatagtagccgctaatgatcctttgtattttggcagtatcagttataatgtttcctttttcattttcaattttatttgtgtcttctctttttttcttagtctggctaaaggtttatccattttatcttttaaaaaaaacaacttttgttttgttagccttttgtattttctttatttcaatttcatttatcttcccttgaccattaatatttcttcttattttggtttagtttgttcttacttttctagttctttcagatacatcattaagttgtttatttgaaatttttccactttgttgatataggcccttacagctctaaacttccctcttagtactgcttttgctgtatcttacaggttttagtatgttgtgtttccatatcaattgtagcaggacattttttaatttccttcttaatttcttcattgattcactggtcatttgggagcatattgtttaatttccgtgtgtttgtatagtttccaaaattcttcttgtttttgatttctagttttattcaattgttgtcagagaagatgtactttatttcaatttttaatcctgtttttagacttattttgcttcctaatttatggtctgtccttgagaatgatccatgtgctgagaaaaaaaaaaaaggcatgttctgcagcctttggtgaaacgttctgtaaatatctattaggtccaattggtatatagtgccgattaagttcaatgtgtctttgttcattttctgtatggatggtatgtccaatgcggaaagtggggtgttgacagctctggctgttgttgtattggggtctctttctttagccctaataatatttgctttatatatctgggtgctcaagtgttgggtgcatacatatttataattgttatatatcttgctgaattgacccctttttcattatataatgaccttctttgtctcttttttagtttttgtcttgaaagctatttgttgtgatgtaagtatagctacctttgctcgtttttggtttctgtttgcacggaatatcttttttcatccttttattttcaggatatgtgtgtctttatggatgaagtgtttttcttgtaggcaatagatcattgggtcttttttttattaatccattcagccactctatacgttttgattggagagtttagtccatttatattcaatgttattgttaagtaaggacttactcctgccattttgttattttctggttgttttgtggtcccctcttatttccttccttcctgtcttgttttttttttttttttgagacggagtctcactctgtcgcccaggctgtagtgcagtggtgcaatctcggctcactgcaagctccgcctcccgggttcacgccattctcctgcctcagcctcctgagtagctgggtctacaggcacccgccaccgtgcccagctaatttttttgtatttttattagagacagggtttcaccgtgttagccgggatggtctcgatctcctggcctcatgatccgcccacctcagcctccaaagtgctgggattacaggtgtgagccacatcacccagccttgtttttttgttggtttttttttagtgaaggtgacttttttctggtgctatattttaatttcttgctttttatttttttgtatatctcttgtatgtttttaaatttgaggttatgaggcttccaaataacatcttataacaaattattttatttaaactgatgtcaatttatcactggttatataaacaaactaacaagcaaagagaaaactaataaagattctatactttaattccattctcctgctttctaacttattatttctatcttcttatattatcgatcagactgaaatttaattctataatcagtgactgctgggcaaaagaaggtgaatttacattttgatcattgctccttttgtctggagaacattttaacctgttattgaacatcttagtatctagttacactgtgggcttatgttgttctatgtttacatttgtatgtttacattatgtttacatagataatgcaagaaatattaaaagagcatggcgcagtggctcatgcctgtaatcccagcactttgggagaccgaggtagatcactgagtccaggagtttgagtctaacctgagcaacatggcaaaacctgatctctacaaaaaatacaaaaaaaaaatagcagggcatgatggtgtgtgtctgtaatcccagctacaaaaggctgaggtgggaaaattgacagaacctgggaagtcgaggctgcagtgtgccatgattgtgccactgcaccccagcctgggcaacagagcaagaccctgtctcaaaaaagacatattaaaagggacaaaaaactaggtgcttggcagttttctttacctttgttataataagcaattggaaggaaggctttcattaactaaatgctgtgggaaattattagcaatatttccattaagtggcttgtgcttagactgttggttcttaaggcttatgaactcttcgtgtacttgtgagatggaagaagttattcattaaaccccttcgtaaattgcccagaatggctttgtggagcctcctctcttcctctgtattcagaaaagtatcagttgttctttgaagcataatatctgccagctttataattgtttgtcatttcttagaagacagacattttttaatagttttgttgttgttgttgttgttgttgttgttgttgttttgctccccttcctgattgacagcagccttaaatcaagatctcaaaactgtgactctgggccagttatttaggaagaaaaacatttaaaaggaagaaaatacaagattagaaacataaacattccttttaagatagaagttgggccgggcgcggtggctcacgcctgtaatcccagcactttgggaggccgagacaggtggatcacgaggtcaggagatccagaccattctggctaacacggtgaaaccccgtctccactaaaaatacaaaaaattagccaggcgtagtggcgggcacctgtagtcccagctactcgggaggctgaggcaggagaatggcgtgaacccaggaggcagagcttgcagtgagccgagattgcaccactgcactccagcctgggcgacagagtgagactctgtctcaaaaaaaaaaaaaaaaaaagaagaaagatagaagttgactgctaatcagtaggaaaagtcttaaaacaaatgactttattctttcactaaacttgctgttctcaagattctaataccccatgaattaaatatttagaattattatctgttttttttccttttatatacatacattagaactctttacatactatggtaagttccaacatttttgtgaagtattacatactatggtgagttccaacagttttgtgaagtattatttggataattccataaccataaaatcataatcattgtgaaaattaattgtgatttaaatattttatctatttatgtaagtggttttacataaataagtttactaaatttttcttaaaagtgtcttatattcaaacctgtaaacatctgtgactaagttcactgtctcttcctactgcagtcatatttttaaaataatacaatttcagaccatctttccctcgccaaactcacatataacacagtctatgaaattaggataataatagcacttatagaagattggtgaagattcagtgtaaagtgtttggcacagtgcttagaacattttaatcattctgtaaatgtgagctggtcttagtagtagcagtattgtttctgaaatgttaaggtaacagaactggattttttctctctctcttcatatagtccttctaaaaacctgatattcccaagtgttttattttgtaaatcatctcatgtaagacttttgagaaatagttttagaataagaacattcccaggttgttcctaatatcctttttcctaaactggaaattctttttaggcatcacctgactgtttcgggactctttgttcttctcctttgtcagaaagaatgaaacggtgaaggctaaaactgctacatccacagatggctgattcatttcttagtgctcagaacttcatatctatagctgttttttttttccttttctgatacagccagtaattggctgagttccagaaaccatactttctgtcagactccctgatcttttttggattatctgtggataatcagaattatgtgcttggaaataattgtagttcttagctgtaaaacacgaaaaaagacgctaaacattcacagtgtagggtgagatagctgcttaggcacttcctttcccccttccttgcacctgttcatctagtcccttggccccattttaagtgcacacggagttaagaaccctgcggtttgcatgcttgctatatctttaagcactctagccttcattcctcttagaagggctagagcaacaggagcaatactcttttgcttttatcctctgtttacatattcaccttatccattatacatggagccactacacagaaagttcttggaagaaaaagaatttaggatcttgatttcagggctaggcccgtctaaatccaagcatggttacaagaaaattttgtaaattaaaaaaataatttttaattttcaagaaagggattgattaatgaataataatttattgctgattctgtctctcatgggtgtgaacttacagtgaatagagacaagccttctcaggtctgatctcttttttcattcagttagcagataccggattgtttattttgtgccaagtatcacactaggtactggttgaattgctccttgtcattatgtaactcatcttaggcaagagaggcagataaaaagcaggtatagaaacaaataataaggtatacactagctttgataaatgctgtgatagaaccaaacaaggtaaagtgtaaagaataaactatatggaagtataggaagtcaggaaagacttctgaggagtctacattttgatgagcactgagggagttagcgatgtgaagattagggagaacaaatttccaggctgtgttacaaaggttattcaggatttaccaaccagcagaaaaggctataataagctctatcttagcctttcatgaaatcacgtatttccaatacaaagaaatctaactgctacattcttgtgttgggaacgttccaagattatttctcacatgttataaatatgtattggcatttattgtatgcacttccatctaaccatggattatctttcaatatagagttactctgggggctttgtcatatatctgtattgaataccaatacaaaaatccattattttaaaactgtccacctttggggattatttacactatttcattagaacatatagtaaagagttcagagtgtgtctctgtgtgtattgtatgtctttattacctcaaataactatattaatgttcatataatatgtgcctcaactgtgtttccatttttattttttatttttacttttatttgtatttttttgagacagagtctcgctctgttgccaggctggagtgcagtgacgtgatctcggctcactgcaatctccacctcccaggttcaaggggttctcctgcctcagcctgctgagtagctgggattacaggcacgcgccaccacatcagctaatttttttttgtatttttattagagacggggtttcaccatgttggccaggatgatctcgatctcctgagctcatgatccaccggccatggcctcccaaagtgctgggattacagcgtgagccaccgtgcttggcctccatttttatttttaaagattagaaaaatattactaattaactatattaggagtcattaaaaatgaaaatatttttatgttcaaacttaatttttacattttactagggacccagaatcagccatatgttcagaagtaggctcctgaaaatcaatgtatgtgttctgtaattaaaagttatttttcataatattgaaattctaatttatgttcttgctagttttggtagtataaacactgtttatagaccaactattttatcttgtttttacagtactgctttatccatatttgattttaacttttaccagttctgttgaaaaccgttaatcagaaattttataagtctttgatttagcgtttaaattgagatgtggaatgtaaaagtggtgctgagcagctacagtgttgaaggttaaatttatcctagccatgaaaaagaaatatattttcctaccctctccttccttacccagtgattgatcacacaagtcagtagcatcatacctttgtgagatatacaagttttttttttttaatgagagacatactgagaactatttcttaatcatgaaatagtattctttcagttcccagattctcacatttgtaagtgtaataatgagttttggcatactataaatatttatgacaactttcaattgtaagttttgggaacctaaaataagtcttctaagtaagtcattcacaataaacacttttactatcaatatgtgattttagacagttgcctttagtctcagtaatgtgatgatatttctaattcatacttgggagttacctaataaaaatcagtgaaaaggaggacagcttgtcatcattctggtgtttactctcttgtagcatgcacttctcatcatgtgtttaagccccagtgtagcaatgcagaatggggattgtattaagatgttcacactactattcagcaatacccataggttaaccaagcataaatttctatagtatgtaggtgtcaatgtacctaaaataataaatacacatattatgtaaatttaaatgagttattattttaatatatggagcatacatttaatatattttcaaaacttaaagtttttgttggaaaacttcacaaaatgattctaaagtgtgtctggaaaaatatgtcacaaaaattgagaaaacattgtaaaataaagaaggatgaaaaagaactttcccatgtatatgttaaaacattttataaagctatagtaattaaagcaacagtgggtagacatggatatatgtaaaaatgagaactatttttagtgtatgtggaaatagtatattgttaagaaatagactaatatatagataaagatttagaatacagtaaaaatgatattttaaatcagtggattactttaaattattgtacataaatggtgttggaacaattatgtaactattggtggtagagctggggtggtggcagaggaataaagtcagatactcataccttatcttataacaaaatgaattccgggtggagaatcttaataaatgattctactttttcagcagtttgttctgtttgaataatagttattggagaatatggaaaatttgttacagtttaagagtttcgtgtcacaaacatacatcttaattttcccattaattattctaaaacttttcatatctatgtatacttgtttacctttaacttgttctgaatcctaaaatggtatattgaagtcctgtatcatatagtaattttattaaaacctcctcgaatttccaagactctttgtacttttatttcactgctttctacttccatataacaatcaaccagtcactgttaaatgatgacctagaaacctggataaaagggtttgaaacatattcgataaactaaattttaatatttcatgatataaaaagctcttacaaaacaaaataaaacaaatataaaaatgagcaaagaacacgaacagtaagttcatttagaacatactctgatatgctctaggcagatgtataaattggtacaaggttttcgtataggaattattgaaatgtgtcaaacgtctttaaaaatgcatacccttttacacagcaattcaactcctaagagtttgtcttaaggcaataatcaaaacatcaaatatgtgtgtttttagttgcccatcatattgttgtttataatgacaaatttttgggaaaatcctacatctcacatatatgagatcctacttttactattgagaaataataacaataccaaataatagttgtagtatgctgtaattttataaaaataaatttgcattttcatatttatacatgaatagtttagaaggacaatgtattaatacttgtgcgtaggtttttttttacatttatacttatgcttcctttcatagtgattcagagtagaaatacctttatagttttacaaaacctatcccatttttaaaaaatgatttaaaagatgattagagatttttatcccatagtaaatattatagtgaaaatacatctgattaatggaaaatttggcatttaatatgtgacatataataatttgagttttaattgatttttttctcacattttgatgtttaagagaaaccagttttcccctgagaaggcttttctgtattttccttctctgttgtactacactatcataacacttattaaagatgccatagtgtatatagtcctctgttaatttgtctgtacttcctattggccttgtccaagatatgtagtatgaactacatatgtaattttaaaatttttagtagccacattaaaaatataaacagaaacaaaataaaatgatataaaaataaacagatgaaattagtttaaataataactcaatacagatacatgaaaaatttatcattttaacatgcaattagtgtgaaatttgttaatgaggtattttacgtttttttttctgaccacctgctgcctgttgataaattttacgttgttttgtcatagaaattttcaaaatctggtgtgtattttttacttatgcacatctcagttggactagctatgtttcagctgttcagcaatcatatgtggctagtggctgccataccaaacagcacagccttagactgtaagctctgtgaggacaagggaatcctttttactccagtgcctaatacagtgcctggaatttaataaacattttaatatttgaatttgcttccccaaacaagtttatttgcagtttctaactgtgatatcacttgctgttttatacttcatacttttcatttatatactcatctcttaaattgtgtgctcttcaacatagtaaccatgttttattcagctttatatctctgacatagaagacactcaatatatgtttgtcgcaaggaagttagagaagagagaaactgattttttacttcaaagaacttttttctggtaaatcatctcttgagatatttcacattaagtctcacaagttcaaaattgtaggattatttagcatttagcagtagaaattgaaagacctcaactgttcatttatttgagctttagattaagccatcgaatatggctgattgctgattttatttttaaagatctctaaggattagagatttatcagccttccttaatacaaccttgttctttgttgaataaattttacagctgttgagttcttccctgtcaatcttaataatcctttgctgtagcataagattttttcccctgtgatcttcagtggagacagacaatagttggttaatattaatcatataatgagctttagcattaataatattagttatgataattaccttaagctttctttatctaaaatgtagaacattaattttaacatttacattatttcaatttttcttttaatatttcaatttttcttctaataggaaagatgagatcagtaatgtatttattttttgggtgtgtgagatatcttttccccacataactgatgttataaataatgctgatgagtgcttttagtttgtcagtaatagtaactgagcagccatcatatgccattatggtatttgttgctaagaacagaaaataatccatatttgttttctgatgtgctcttagctaatagttttgttattaggttaagggcctaggaatcattgtttagccatgttagtatcatgcatactccttgttacagtagccagacatgtaaattaaaaccgctttgctgtcagacagatccagttaaaattcaggctttgctacttgtccagcatcttctcaatctcatctatatgttacccatctcataaagttgttgcaagaattatatgagataaatgtacctaaagtatgtgtctacagtaaatatgcaacaagcagttacttttattatcatcaatattattatcttttctaaagaaacaaccaaatactttgttgtcggcattgggatctaaatgctgggcatcttcacaaacttaaaaattacccaattcccaaaaataaaaccaaaataggcaaccggtactaagccaaatatcacatctgatattatgggctgtgatttctcaatctttttccataagaaaaatataagaaagaggaaattcctgaaaaggggcaactaaaattaaaatacagctaaggcattcagtttatttattcatttaatctattgagtgcttactatgtggcaggagctattctaggaacttgggatgcatcagtgaacaaaacaaaaattccttcattatagtctttctagtgaaatttagacttagaacttcaaccccagcaggttctgctgtgaggatgggagaagagtgtgctagaaacaggtggaggcagggaaggaaggtctgctctactttgactgttaaaaggcctagatcccaggacaggagaccatcaggccaaaatctaatgcctagtgtctgaggaaacaggtaccctttagtccagttcaagttcatgttgatgtccaagaggcctcagacaatctatggggaatacagatctctgggtagaggtttggaggatgggtggtatactgactgaaaaagaatgctgacaatttggaatatagcccagatggcagcacctggtgaaaagggactgtcacatcatctgagcccaaaccaactgatgggaattgaggatagacttcaggctcctcttagtagagaactgaaataaagaacaaatcaggagcagagactgaatgtacagcagttgagagaagagctgtgggcagatagaaagggtgctgtgtggagggaagcctgttgctgcataaccaaagcatgtgtcctcatatgtagtttccaaaatgattcctaacatgtataagtcattgtagaagatgttcatagtatttaagttgggatttttgtcatactgtaactttcggttttattggaaagtaaatgttagtatgttcttgggcagagggttatctagcttgataaagtgcatatcataaattgataagtttgaaagtgactgtaggagataagtcagtcaataagttcctggctttcatttcagaaagtgttccttttagaggagagaaacactatcatgaagatatgcaaacaatgctagaaaatttgataatgtgacttacagaaaaacagaaaagttttgtctgaactattaaaattcaacttgcagcagcagcaaaaacaagtaaagtaacagccaaaattactctgttagctatttcaggacttatttctaaatatttataaatgataatagtatgatgaatttggctggtttccttgaaaaatttaaaaaggttagtaaaggcaatatttttaaaaatatttgtttattcacagttttaaatggcagaaattttataaggcactgcataattatcaaggttttaaaaacagttacctgtatctctgggataaaaaagaaagcacatttgactatttgaaaaattgaaagttgaagcaagaccatgtcaagaaaaatttgttatctgtatcttctccatttatgtgataattgttccctaaatccaaatttatgtaacaaaactatattctatgtatttcccatgagtcaactagtttctctttagtgtctgccatttccagcattcttttaaagcctataaacaaaatttggtgtaaaagattgcatcaaatgttgctgatagttattaaaaatatatttcaactccaaaatttgttcttaaagactagcattttaatcacagatgttattttttacctctgattaataattgtatccttaattattgacgatagctgaagggtttgactaagacatcaggaataatttttctctcttcctaagttgtgatgatagataaataatttttctatttttaaagaaatacattagttcctaagtatcttatttctcttacttgaaaggataaaagaatgtttcctgtattgatttcattttcctgtgaagttgaagcatgaaaaagtaaatgaatattaaaaatattccattgtgttggtataataaaagctcgaatacccaaagaaaagttccatactatgtaatattttgtgacttgattagtctgctgtgctttaaaaactaaacacagaacaggaaatatcccagtcaatgttagagttttatataaaacataaagtttcaaattttaaagataaatttaatttcctttacagtatttatcaaaattaaaagggtgaaatagaaatgtaacatcaagaggttttataatcttaaggtttttctttgtcatttattaaaaattatttttaaatagcatactgatatgattatactccttccaccccagctgctttagaggcctgtcctaaacaagcaattaaaactagattttgttcttttaagtttgaaaggtggctcccacacagatttaacttgggtaattggttggccactacaaccagctagtgactgattgtgcttccattaagagcagttcggccaaggaactctgctcgacactaaaaccactgagaagagggatatatagtctctctcctggatgagttcacaatctgctttggaagcaggaacagcatgtaaatgcataattgaaacaagtgcactcatactataaaagtatgttcctagaaacatgattaatacataggaagaatgattcactctgcctaggatagctttgtaggggacatggctaaggcaaagagtctttgtccaaatgagtagtaaccaacagtctttaaacagcagatgtgtctcccatgagattgtgatcttcgtaagggcagaaaccgtgtatattttgttcaccaatatttctttaaaacctagtataataatcaatattcaagaaaagcattgctgaatgacccaggtaaagaaagataggaaggagcatactaagcagaaatggaattatctacattagatgttcaagaaatgatacattgttgatacctgtggaacacaaagtcaagacaggtggggaaatggttggagataaagctggagggatgataataatggtaggtaacatttattcagcatttactgtaccacacagttttaggcaccttatgtatattcgttcacttaatcctcacaaaatccttgaaggatgtacaattattattcttccatttttacagatgaggaaactgaagtacagagaggttaagtgattttctccagatcatataagtgacttagggcagaaccagcttttgaacccaggcagtctggctccaagtttacgctcttaatagtgtggggctttttgtatttaattagacatatgtaactgacatttttgcaagtcgcaatggttacatattggtaatttcaaatggttcaacctaatgtcatgcagaagaatttgggtattataaatacagatggaaccctggaaagggtttgaacaagggaaacaagacttttgggggcaatagactatagcctccccaactcaccaaaactctctaaaaacaaggaccactattatccagtaatccaggactcccactctaagcctgtcttattcccatttctttgtaaattggcctgattccttaccctttgaccttattcctttgactttaccagtccagttgcctttggctgacacttctctgtttctggtgatttctgctactataaggtgaagttctaataaccagcgctcaaaaacagaaaagaaagcaaaagcaactctttgtaaagcttttctgtatgaccttacttccttctgcttggcccgggccatcccaggtctacccataaagcatatactgctataagattgagccaggcacagtggctcatgcctgtaatcccagcactttgggaggccaaggcagttggttaacttgaggtctggagtttgagaccagcctgggcaacatggcgaaaccctgtttttactaaaaatacaaaaagtagtcgagcgtagtggcactcacctgtaatcccagctacttgggagtctgaggtgagagaatcacttgaaccctacttgggaggctgaggtgggagaatcacttgaagccaggaggcagaggttgcaatgagctgagatcacgccactgtactccagcctgggtgacagaactagaccccgtctaaaaataaaaaataaaaataaaataaaaacaataaaaaaaggattgaacaggagataacttaaagcataagagaatttttaaatagttagaatacatatataaaaaatcgtgttttaattgagtcctttctggttttatgttttagaaatgtctccaagtatgggtagcacataaatatcatataaaagtaatttcatatttctcacagttattctttaatctgtactgcttagaaagacaatcttgagaataatgataggaactacatttttttagctagttatagcttacaaattattttcatatacagattttcatttgatcttcacagtagcctagtgaggtaattatcaccattttatagattaaagaacatagatttagtgaagatacatgtgttttcagagcttcattcaaggttttctaccttcagatctaggctttttttttcactaccatgcaaaacctcttcacatttataaattctatgaatcaaaatcttattaatactagctaatactggagacacatgagtctctagtccaagctttaaccactatggcatttgtataaaacaagtaaattcccaactctgtgataattactcaggtaacctgaagtattttttattggtgtaaaagcaattttgatatcatcaatttgaagcaaagaagccttatcctaatgtaacattcagataatacaggctatacaacttgtctgtataaactagtgctgtgcgttaaaatagcatttcccaaagtctcttagtttacttaagaaatatttttcgttgtgtcttgatgtcagtggcttttataaactggttacctcatctgttcattaggctctgtgaaggaaagggggagatgaaggaaacatccaacctagggtaagtcatgaaaggatttttttctacacagcaaaatcttagatcctactgtaagactttacccttggtttccagaagaaaaaaggatggacaagaggctgctctgtctcttcttcaactatgtaccaatcagagggtccacataccatgcagtcattgactctcccttagggtttactaaagctgtatagttctgccatgtttgttcctaaccagctttcccgacaggcctgtttttctctattcacatatcaccaaagactgtgctaaggcactaaccttggtctggattttagaaacttggggaactataagaagtagggcaagactggcttccaattgtagagaataaagtcctaggggggaactcaagatagtatccaaggggaaatctagctcataaattacaaagtgatctaacaagctcccatgcacaggtaccagaaagagaaagaactcatgtctgatggaaaggagccacaaacgaaggtagaaagataggcgggttggtgttagtaagagactgaatctggcaaaaggcccataaatgatggatacctttttgtagtacccctgtggcttcaacccagtgagaaaaggagcaataaaggacatcaaaaccaattttcagtcccactccaatcttcagagcttgaggtttctgccatggttaattctaatctttttcttatggacttacccagacccattagctagtgtcttgatttaacttgggaatgctatcctggcctattttctcccgcaagatgtactgggcctactctctagctctagtctttaactaatgcactggtttggtcttcccagtttcctgcattgcagctcaagcctgaagtctttctgtcatatcggaactaaagagactcatgcttcaggaactataggagagaatgccatatgtagggctggaacaaagcatgtacaggaaaaggagggtgggagaaagaggatgaagaattactctctccattcagcaaaaaaggaaaatgtttcttcagattaccaagggatacttgccagtgttcaggatgtttcataattcatattattatcttattttttttgtagtgggaattatcaaagacagtaaaaagatgttagaagagaaattcaggggtaggggaaatgggaatatgttagtcaaaggacacaaactttgagttataagatgaacagtttctgggaatccaaggtacagcatgggtggtgatatgtgtgttaatttgtgataatcattatgtagtatatacatatatccaatcatcgtgttatacaccttggatatattcacccttgtcaattaaatagtttaaaatataaaagaaaaattcaagaccttaatgtcagctaaaggccttagacttagttactctccccaaccccttctgggttatttttgtttgtttgaagaaatgttattgcctcaaaaattcttgatttctctagttcctctcactctattttaatatcagtcagctatccttgtgtttccatctgatgtttcacagattgagggctgtgaagtcacttaccctctcgaagcagttaggagactattacagctattccagaaagagatgataagggtttgaactatgtcacgtgcagtatgagtgccaaggaaggggttgaatagttgaattcaaaaacattttcagaaatagaataaatacaaattcttgatatgacagggtaaaggagaggggagaatccaagaagatattgagagtacatttctaacagaagtagagggcccatggcaatctatgaattaagacatagggcacagggttaagagcaggtttcagagggaacaaagatttgacatttgcttttggacttgttgaatttgaggtacctgtaggacatctaggaagagaaagccagaacagtctagttgaaatatggggtggagggtataacattgagagaggctcaaaaggaacacagcggagctaagtgattcaaggatggtatataggagtctcaggtcttttctttaatattgtctatcaaaatcacttccttgtcttccacagactccttcctgagtctgtcttgctgtcaaccctgcagaagattcccacccccaccctgtacccctaaaaggcagggcctatgtctttacttctccttctttctttcttttttttttttttttttgaggcagagtctcgctctgttgcccaggctggagtgcagtggtgcgatctcggctcactgcaagctccacttcccggttccaagccattctcctgctacttctccttctttataacctagggacattgctaaaagatagcagtttttaagaaaaaatgctaaaagagagcatttttaagaaaatatagtttgactatgacttcattttcagatgtcaggactggtttttgtttcacttttttgcccattaagatttagaggttttctgcaagtcagcagaaaattgtagttactatatcccctgttatgaaagcaaacccccagttttcttctggatatgatgtgttaatatgggaacacacattttgctgacatgccctaatgcttaatattttgatgaatcaatctgggaataagaattgattgaaaacatctcaattttacattggctgaagtaagtattggttaggaagatgggcagccagttagctgacaggatctacaccgtgctagatggattgcaataaaaaaaaatagaattaaacacagtatactgctatcaattactgactggcaagtatgttattgaaccatatcagaaataaaagccaaagcattttcctgtgattcccaaaaaagctcaaattgcgaatatctttagtgcctagtaaacaaacaattctaccttgtataatgtgaaatattacagtgaacaaagtatttagttttttctactagcaaattaagcctttttaaaattctgtgcacacaaaaaacatatgcttattatattaaaaattgattatttgagtggctcttaattcaaataaagctttaaatggaaaagaatacattccagtataacagaattttacctgtactaaactaaaatcatatctaaaatacaaataaagaaacagtacaaaacatatcctttctgaagcaccattaacagcatcttgaattggcatctaaccacagcattgcttataaggtagtacatcttgtgctcttattggccaagtttttcatctgcattccatggaaaaaaagtttggctatcatttgtaagagtatgatcagtggtgtgttgctatgagcccgtgaaatagaaaaacaaaattaggaaagacctatgtagctagaaaatgtggctttttaaaattgtcatcagaaagctattaatgacttttaaggaagcaagaaagaaaaaaaattactaaatacaaaagcctgttaaaatgatttcagtgttttatgctacccttatgaaagtcttggacttcaaatgctttttcctttggtaatgctgctaatgatagcaaaatttttagccttacgccttgtaactggagacattattaatacacaaaaatgcctttcatagtctgagccatctgataatagggtggagtatatttaaatcataatgaattgggagggaagagattgttatgtgacagacataaaaatcctttatcatttaagtgaagttgcaagaacagtcccctcataagtcattattgcccccaatatacaaagtaccagagtccattgagaagtcttccaaggtaaaattctggacccatattccacagtagctcctattcttccatatctcgagcataccatgttcagagacttagaaaacttgtaggaacatgtgagcagctctgaggtctttattcaagtataagacttaatggaggcctaaccaggtcagcaccttcagagggcgtacaggtggcccctcttaccttgtatacctaatgttaagaactctacagaatactagggagggcctttttcaggagaaaacaaagatttccttttttgaaaatataaattcaacttcctttctcaattttttataagccatgttaacaatattttattttatcatgaatatctgaaatattaggaataagaaaagctcacaagagctttaagttatgataaaatacttgaagataaaggcagcattctttctttcctctgcattgggcttgattggtggttcactaaactgaaaagccacaggtggtactgcagactaactgcaaatggccctcatattccagccaccacagaagctagaaaagttttgacttctgtatcagttaggctaacacagatagatgtagtaacaaacaacatgaaaatgttaggagcttaaacacagctaagtttatttcttgctaccatgtgtcagaaaaggagctctgggcacagtagcgacttagggacactggaagatggagagtcagttacttccacaatcatagaggcagagaacttgccaagctgtgcgcaggctctgaaagctacttcctagaagtaacagtcatcacttctgctcaaatttcactgactaagtcaagttacacagccatgcctgcattcagtgtggtggagatatgtaatcctcctgcagagagagatactgtatatttgtaaccaataatataactaccaaacttccaattctatttgctatgccaatggagtgtaggtttcagaacagtttgcctggtttattgtggttttcaaaccaccagcataaaagcctacagacacatcaagtgggagaggccttggacttcatggcctgttcttcccagtgtggccaccagagtgtggattccaaggtccgtttttcctggtttgttagtaccactgaattttccgtgagcattatcaactcccttcacatagtaactttgggctcaggaagaaaaggcattcataatctcatttaagagggtgaagatagagtgggaaggaggatacagagactgccataaaaacctgttcatgttctattatttacacaatgggagttttctgagaattgcttttaatgtgagttacaaagagatttaaaaataataattaagttgtcgatattagaacatttgaaaactcagttccacttcctttgcttaattctaataatctgaccctaattcccttctctaatgtttttattatataaatgacaatgatggatgtattgtttgatggtgagccactgaacaggtgtaggaaatatacaaacaggcaggctccatctggaaaattttcatcaaagaggtaggattctagggactataaaacttatttttataattaagataacaagagccatgcttgagggaagtgaaaagaaaggcatacttttgaggaacatttattaagcaaccactgtacgacagactctgtgctaggtaccacggatccaaagtaaatatttatagagagagcatatacagtatatggtatggtttgcaggaactctggagggagatttggccaaaggcatcaaaggcaaatttgactaacagaagaggacaaacaaagaaacagaaaaaaagacatagaaatagaaaaaatggaaacagcagacctctcagtgacaagtcagtatatattttagcattgaactccttcttctgtggaaggttgtgttttatattaaaatgtgaggcatgcagagtattagaattgtagattgtagctagtagacgatactgaggaagcctaaaaattttacctcttcaatgttagggagattgatggtcagccagtgaaaaatgggtcttcgcttttttatcctgtcactgaagatgagatgtgattattttgtggaaaaagcagcaaccttgcaccacttctggccactttaatttaggcaaggacccatctatgttgagtcacatgttcctgtttaattaagaaggagttcagggtcagtgaaaaatgctagcagctctgtcattcctttaagtaacatggacagtcagagtcagcatttgcagcaatcttgggagcatcaggaagagttatatcaggaaacaagatacttcactcctctagcccaatccacttacacagagaaaagagtttactgtatgccataaagtccttgactctagacacataaatttacttgtcttgttgccaacctaaaagatagattgtctaatcagcctctgagtattgagttaaagaaaggacaagcaaaaacatttgggagaaaacagaaccctaactaggatccagtgtaagtttttgtttcactcgacctgtttttcatgtcagacctttctatcagcctaactgtaacttacatttcagaattcagagatctcctccctttttcagacatcacttcctcagaggccttatccgtgaaccccatgaaaatagtctccaccccacctccattatactctgtccccgaacctcctctattttttctaaaaacagatataactatcagaaattgtaccacttatttacttgtttattttttgtcttccaccaatctttttgttttgttttgttttgtttttttttgaaagtcttgctgtgtggcccaggctggattcgaactcctaggctcaagctatcctcccacttcagtctccctacaagctgggactagaggtgtaatttctaagaattacagaattttgcagcaaaatatatatatatttatataaaatatatatatatctatcttggggtcagcacctttctagtgtttttcagtttcaagcagtatctttggatagaggcagactaggaggcatcttgattgccattaacacactggctcttgccaccaatgtctaagctccatgaggaaaggaatttattttgtttattgctgtgtttccataatgtaaatgtcaaatccattactcaccacaaaagcatgatttggaaccattttcctggtgaaggtgtttcagatagctgaaggtagagagctctctggactctgaatcccgacttccctgctcattttatccttcatattcttcctcttaccatttttaccaataggtttttttaaaagtaaacaagaaattgattaattttataaattggatatcagagaggctccttatatctcagaggctgtgtgggagatatttaacaagtaccaactgggagtcagtgaacgtgcattctggattggtgatgtccttggccagccttggagttctggcttccttgagatctgagtcttcctatggaaatcaagattacagtgcatcctctcagagccctgcactccgtagcatgctaattctagttatctacatttacctagatggccttttccaattatctatgtatatcagatggtatctacatacacctatatctgattctcattccgatctttaaaagtgagaatatctgaaatgtgcatttggcttgttttggggttttctttggtttggtttgattttcctacacttagctaaccagaacacaagggccttttcaggacctagccagtttccctccattcttggagtagctaagggccagagagatgttaccaaatgttgtttggatggacctaggacccaaagcatttaagaggtttttggatctcggagcaagaaaggaaccttaggagatatgaggacaaatacaaatatcttttgtattgattctaattccaaatcaagtaaattggagaacatgagaataaatgtggtatttaatttgttacagtttctcctcccatctatgaagaatcttcaagctatgaagagatatgtggtgccacttttctccttcaaatctcctttctctgtttttcaaggtcaaaaaaatctgaccaggattgtttcatttctttagttgtttttttttttatgaaaatgtagttaagctttattgttatgtttcaaattaagagttatgcctttgtgttaataatgcatggcaaactcagctatagagagctttgcctagcaaagctccctctctcccttcctggtaaactttctgatagctccaatgttgcacatgcataaagtcactgacttcacccagtatgtcctgaagaacaagggactctcacttggacttgcacagccaaagcagagaaagtgactctattcccaaagaaaatgctctctttgaaatctccagacttcaaaatagcacagtcatcttctttgctaagctttacaacaacatgaggaaggaaaaggatgattacagaaactttctcatatcattttatgaagttaaatttacctacatattatgtgcttcagtgttttatattttctttacaatttttttcttgcctgagttgtaaataatttgctcccccaacccccgcaacttttctcccctctgtttaaattactctgtgctttgcattgcttggcatcaagcagtatctttggatggaggcagactaggaggcatcttgattgccagcaagatctaacattcaaaaataaagaaatgttttttaaaaagaagatctttattcaagtgtggtaaaacattttctgagatcattcaggaagcttcagatttgtggaagggaggctgtatgcatatagaatgttattattggaactttattattgtcacattgatgttacatttctcaggaaatatatgctaatgtgtttctacttgctttttttaaggccttgagtagatgtgctgaatattgaagctatttggctgcctagaaaatatatcttacaatttataagctgtatgttattatttaaaaaaaaaatcaataatctcccagaattttgcatgaataatatagagatagaaacttaggtgatttacatcttatggtattcagtttttaagatacgtacagatgacataccaggcaaccaataaaaaactatataatgtagagatttctcaatgaaattaagataatttataaaatatagttttccattttaattgtctgaatttaaacaacagagagggggactgatagaattacagaattttgcagcaaaaaaatacatatatatataatctatctattttatatatatatattatctatctaatatatatataatctatctaatatatatatatatatatatatatatatatatatatatcttgggtagcacttttctagtgtttttgaatttgtttaccagtgaagtggagaaccaggtccagctctttctccccttgggagcacaagtagaaatcccctcatccagctggcgttaaagaggttaaatatctaaattccaaagttactgactcaagtattattattaactactaatcttttacatgcttctagccatatttatccacatttcctctgttattattataattgttttagctgtcttgtttatttctacatgcagtaacatttccttgtatggcaaaatttttaaattatgaacatatatgacatgtatgacatgacatggatgaagtacctataagacatcatatatatcgtataattatgtgtgcctcacaaaagacaaagttcttccccaaagtgacacatcgatttgaatgatttaaatatccatatgccagagatgcagtactgacagaatgaaccacagaggttaatatgttgctccatatggtaagtatggcattggcaagacttgactttgctatgttgtatgcgtcattacctcagacctgatggactgggagaaaatccaaaggagatttaaaaaaataataatagagaagagccttagaaatctatcagaagatttagtaatatgataagggaatatttaagagacaatgtattttttaaagcattaataaatggaggcaaaaatgttgaggaatacagaatatatgtgataagtgaccacttccattcatagagattataaataaacaactgaatggaaaaatgggtaaaggagatgaaaggcaagtcacagaaaagtgattactcagacttctcaaaaaaaaattgaaaacaaattgaacttattaatatacaaaaaattaacatttaaaaaatgttaaaattgaatagtcattaaagaaatacagaataaaaataaataagatacttgtgtactgcaaattggcaagaatttaaaagaatgctatgaatcgatgtgaataaggatatgggaaaacagacatgcatatgccggcagtgggggtgtaaattgcacaacccctttgggcggtaagttagaaatatatttctaaaaccatgcaaatttgcctttactttatcccagctgttttatgtctaggaatatattctgtgaaattacaggcatgcagaaagactacagacatgcaacatcattcatgatagttttcaaaaaaagaaaaaaattaaatcctgaaaagataaaatatccaacaatcaagtattagttctataaacaatagtatgcccatttgtagaatacaaatgctgccattataaatcctgtgccataagaaaatttgttggcagaaaatattcacactatatttctagctgaaaaaggcaggccagatgttagaatctatgatgtaactttttgaaaagtatcagtgcatacaaacatgcaaacatgtatgttctatacaaagagaacacacacacacacatacatatatatatatatatatatagagagagagagagagagagagagagacagagacagagaaatactagtgaaacacaccaaaatattgagtgatatttttagttaggttccaaataagtttgttctttttttccattgaccaatcactttcgtaactagagaaaaattaaattttttcatccatactcaaaaatgtatttatttttgaattacatgtcactccttcttcaatgaagtatttgtttaataggtttttttaaatgttgtacatatatatatagatggttaagtatgtagtaggggcatctgtcttaactgggtgcatgtagattttataatctgtttaatagttcacttacctgggatataattatcctgcaactccaactctccagtgaataattaagaatgggaattaatccatgaaagagctctaaagcctaaatgtatgccatacagttacctgcactgaaactgacagtttagatataggagattcttttgaggcatctttatttttactttaagcataagtctcataaatttggttttcaggttctcatagattttaatctgcaagttagaaaaaggctgtcagggaaggtgcagtccagagagaaaagaaacaaagatgctttttaaaaagattgaaaagacagtaaaggaaagggacaagattcttaaagcatcagatagcatgtgggaagaaacctgcttttaagtagtctgacgtatcaactctcttacaccaaagtttagttattctattcataatgatttcctagagttgtgtgggacactgggatactattttcattctgtttaagagtataagaaagtatgtgctacattttagaaagtttttcactaaaagtggttaaaacttttaaaggttttcctcaaagggttacccctcagttacttggataatttccttatgtaaaatactttttttcttggccaagacagtcaaaatggggctttggtatgggtatgtgtgtatgtattctcacccagcaagtggctagcgataggctttgatgcttggcattgtaagtaccagaatagcaatgagtgtgtaagatggtcttggagatgctaaggattagaaagatcatcaaataaagatgatgtagatgtagagacctgcattttaacctaagttataatattacttaagagagtaaaatatgaccaaactacatctgtcttacccattgctagcaattgtcacataacctagttcaatcagggtctctaaaaggtccaaataatagtcaagtcactttccttttttctgatatattaaaaaaaatgcaaaacctggttttaaaattgtgacatctttttattctctaatcttatgtgaatgtttctgtgaccatatgtgtaacgttatttaaagatgatgatttaaaagtctaaatttgaggcctctcttaaatgtaaaaggtctctcacaaatggctcttctcttcttccccttactacaaagagtacaagactaagagtagttcacttgtaatagggatgggagggagaagagataaaagagtatctggagcatgagacaccctaaacttctctgagcgcctacagtctgatcccttagaccaggggtccccaacccacctctaatggaagaaaactgctctatttgagtctttataaatcttatgaggagctctcaatttctttattttgaactacaaagaactgcttggagagtacatattatcctgaagggacctcaaacaaatctagttttgtatacctacaccaatagagaaacaaatttcatatcaatcaagaaactcacagtggtatgacctcacaatggcaagtgttggaaattctagtaaacaaagcttgtaaaggattactttaaaaaggagtaatgtaggtaagtagttttaggagaatatggaaacacgcttataagataaataggaaaacaacaaaaccatgtggctgggaataaaatttccaggaacagtagtaaacatgaattgaaaaagttccgttacttcacagaactcagaagtgaaaaatatttactttaaaccagtacgggttcctcgcctgttagaaactgagctgcccagcaggaagtgagcggaaggccagggagcattaccgcctgagctccaccgcctgtcaaatcagcaacgcattagattctcaaaggagtgtgaaccctattgtgaactgcacatgcgagagatctaggttgcgcactccttacgaaaatctaatgcctgatggtctgaggtggaacagtttcatccccaaaatatccccaccgccacccctgtttgtggaaaaactgccttccacgaaacctgtccctggtgccaaaagcgctggggaccactgccttagactgagcatctatttgatcagttggctctcattttctctaagtcatccctttgccttaaactgagcatctatctgatcagctggctctcattttctctaagtcatcgcttccttcctttgaacccacctttcccagtatacctctcttgctccatcaactttaaacatactttcacttcctctggagcatcctatacccatctcactttgttatttcctttaggttccagttagacctcattttccttagcaagccccatttctctaccaaaaattgtttagcttccccttttattactctctcatagcacttactgcactaattatgattgtttacatagctacctctctccctcagacttctctgacactgctctggaatacaaaatagtaacttaactaggaactaggtggtcagcaaacacagccatagaatagcatggcattggcctggctagctcttataagaggaaataaaacaataagttatctctttttgggttccaggagacaatatatctttaacgttatagttgtttatgtttctcccctgtgattaacattctccttgcatagaaatttactgagccattattgaaaatgaaatttcatgtgtctttgctatattattgttatcagaacaatctgtcatttattcgtgacattctaaatgtttgaccttggattagagccctttgcaaatttatcttacataactgagtcatcaaaacagaatacattataatttaattattactaaataatgttaagttaatcaaagtggtatttaatacaattgtattggaaataagtaatgggctctaaaataatgaaatatagaccaagtattttgaagaatttgtatctttggctagtttcttttccctttgaaagtagaaaaatagtctaaaatggctttgctgaacagaaaattgttgtaattcgctgaatgatgcttcctgccgtgctatacttttttgatggaggtttcagattttttaaaaaatcactttgtttttacatttgttttatccatttttgagtattagaggtaatatttttctacacattactttgagacacaagaactggaatcataaggttaaattcagatgaattgttggcaagactactaaattcaaatgaaaaattagattttctgctttatatgcagtatattaaattttcactccaaagaccataaaacaagaaactcaagaaaatgcagagattactaaatttacagactggtacaaaagctacagacatacatctttcacccaaggtaaaagatgagaaaaatatgcaaagttagataacgtgaccagggtgtgtgatttctgttttgcttttgctaatgggatgtattttctttcattggtaaattagggcatttgctgtagtagaaattactggagaacttgactccagaagagatggttccagtaaagaaacttttagaaacagactggtgtcattacagcaacagctacaatgatctggaaaatacatcacaagacctgcggtcaaagcataatctgacagcagcccagcacctactcaaaatgcatttcatctttctcatgttttagaaacagtccagtggacatttttacagacgaagttatgagacaaagtttacagacaagttatgtgacaaaatttgaaaaaggttttccaaattctgtctcataactcgcaaaatcagaaagcaaatgactacattatttttagctccacaaagatgcatctttatagagttatggtttactgtcatgcctcctgttcttaggatcaatgcaagaattttcagtttgtacagcatttctgagactttcgggcaaccgtagctgtagatagtcaaggtattttattccatgatgtaaataatatctccatttgagtttaattccaggaaaaatttgcctgtacatttatacagatgatttggtacatatatatgaacttgaggaaacaaggctatgtaaccctacatatttatctttctgccatagctgccaaaaatgtaaaatcaaagtcagttcctgagagttataaaatctgctatatcatcagctagctcctcttcttagtttaagatggtctagattttttttaaatcccaaatctttgttttaatctaccagactcatcatatagttatctaatttgtgccctgcattagggggtacttgggaaataaatgtagactgcaatccatttgcctacccagaggggagaccagttttaattttcaaaaagacaacataaggctagaagtattgccaagaccataaacccattagaattaggctgtatagaaatcattaataaatataaatgtcaggtttaggactcgtgtagccctctggaaaagtattgaattatgattgctgtcaggaaaaagaaaggtcaacatatgtctctgatttataggtgtgggtatacaatatataaaacaaatataatcagatacgtactgaattgcaagtatttatagaataacttcacggtgaaattatgtgtatatacatgcctttattatacttatggctacattttcagttttgctatcatgttcaggaaagcaaagccctttcaggggacttttcaaactgtgtcaaggaaggaaatgtggaacctgtagttttatgcactacctatcttattaccaccatcgtaataaaactttcattgtaaaagaagccgttaagaacaagccattttggagatattttattgagctttaaaaatattcatgttgtcttttaaaaatagattaacagtggattaacaaaacatagattagaactagagagtatcaaaaaagagtatggaagaagataccatagctatatacatggtatatgtgtatagctaaactcaagtgatttagtctttagaattaggaaaatctattcattagccacagagtcaaaatgaagatgaacatgaagccctttttatgatctcatgaagcagagaaaatttcattataccatggtggtgctatttctcaagcaaactattaaaccaggattttatggtaaaaaaaaaaaaatcaatttggacactcatttgagtttttattaaaaagcagcattatgttatgatcaatcacattatccatcaatatagttacatcttctggttgtacatatacatacagagatatttcaagtgataggatttgatatgattgtttttctttgtgcttttctatgattgcttgattttttattttaaaaatgccttattttacaacagcaacaaaattcattctaaaactagggaaaaaaaggtttgacttaacggttgtattttcagtaataaagtgtgctaacaattccagtatatcatatttgactgaaagatcttgggtgggacagtgggaagagtgagcaccagaatcacttcttaatactaactctatcatttattcactgcataacacagtagttatcaacatttatgtattgctttctatttgccaggatctattctaaattttactaatttaatcctcactatgaggcaagtgatatcattatccccagtttacagataaggaaaatgaggcccagtgatgtatagctagtaataagtggcagactctgaatttgaacccaggctctagagtccttgtatttaaccattagcagtataccgtctctcatattgggaaagtcacttcagttatcagagcctctgctttctcatctcaaaaataaagtgactggctccagaatgttttattatagacagtttgcctggaaacacagaaagaatcaagtggcagggagcagtgaattaccatattctcagcgatctttctcaagtcattgtcttatatttgtttaaggatctctaggtttgcagaaactagcaagagtatagttaatatgcatacttacgcaaaaaaaaaacccatgctgctcgaagaacgggtccaccctgcataggagtttagttctgataagtctcataattggaaccagaaaacaagtgtaacagatgttttgacattatacttcttcacagcaggtgtcatggatagctataacagttacaaacctttaccagaagtatgaaaactgaaggaacagggaagaaaccttcagagactgtgctatgtttatcttccttgatgaagtgtatcaccagttttgagaacattaaatggaagctgatttttaccacgtaaaaggtgaaagccttgatgaaatgatttctgtgttccaatttattaggaaagataagataaataattcagaactgaaagtaggaaagaaacttttttatagagagtaaaaaagaaaccaaatccatgcctgtaagatgaacatggaagaatgagtgggttaaagaatacaggaagaaaaaactcacatcttatagcccttaactattaacatttagataaagatggaaggaaagaggaatctcgtttaagacatagtttacttataccttagccactttcaaaatgttcagagaaaggaaaagtactattcgacatctatatcacttttcctgttgtggctgtaacaaattaccacaaattttattcaacctaccacattatcttaagaccctaaaatgaaaaaatgactcatttggaatagggaccttcaaaactgaaattttgaaataatagtgaaagatccaatattagctaagaaaagttagacatacgctataataacaaataaatactacatctcagtggcttcgtgtataaaacagtatttcttgctcttggaatatcttttatgagtcctataactacagagcatctccatctcaagcaggaactctgagaaaccagtgtgggttaatcttataactctatcatctcgatatgtaccctacatttgccatggcaagaggagccctaaatagttacatggaagctttttactccctagttcaaaagtaacatgtcacacattcatattctcttgtcatatggcccacctagccctaaggaagctaggaagtgtattccatgtgctcgggaatgaagaaccagatattgatgtctcttaagtaactgatatgttactgcctaggatcctatctggcaagaaactttctgtgagactagcataagcaggtttcaaaatttttaatgagctgaggtcattgaaaaatatgaagagtagtcaagttaaaaaagtaagatgaacattttgggggttagtgttcaaactaggaagaatagagccgatacttagaaaagatgtgatcattttaacaagagatagggcaaatcaggagagaagagaaattgcatagaggtacttgtaattcaagagtgactaggaaagtttaattgcttggagtgggtttcctggttaagattaattgtagcccaaagtaaaagaaaacctgcaagtgagatcactaaactgttgatagtgatctcaacactcatggagaatagaaagggaactacagcactaaagtctacaaatattgtcttgatttttcacaagagtgaaaatatagattctgaaacctttataccagagagcttgatgatactctcttacacaattctgaaatggatgataaaatagattgtgagtccatagaagggaaagtgatggtcaaatgaagccagcatgaactcaaaaacatttctttctcttcatttcctgagagagcctatacactggtagataagggaaacagtgtggttatatcagggtttcactaaggtttttgagaaagtttctcatgatatctcttgaggaccagatgaggaaaggggttctaattgataatacagttaagtggatttgtaacaagtggcaaataagagaaagtttttttaaaaaagtaagaatagaaaaatgaactacagccaaatcatgaaaatccttataagcgatattaagggatttagactttttaaaattataatctgtatttactaaggctaagaaatgataagatttgtgttatagaaataacacttttctgcagtgtagacaacgcttaaagcaagctaataccagagacaagccaggaggtaagaggtgatggtagacggaattgagagagttgcagtataattagacagtagttgatagatttgaaaggccttaagttcataaggtggacagggtttttcattaatagaatgtcagagtggaaatacagtgaaacaccaaacactacactcaggaagaagacttgagcaaattagtgaatagtggtaccattggctgataaagaaagcagatttagattatgataaattttaggtagctgtaggatagcaaactagagctatctggaggcacctagttaagccctggaacaaaggaggaatttagggcagagatctaggtctagatctctaggagtcatgagcatatagatgacagtaagagccatagaagtatatgagatgatctagaaagaccctatagactgaaaagaaaagagcacctgggaccaaacctgggggaacatcaatgtttaaggaatttatgggcagaagagaccaagagggggtagtcaaaggtggtctagtgattagaaactaaaggaatagtttcaaagaagcagtggtcagtaatgtaaagtgctactgaaaaatcaagaaaaagaaggccctgagtatgcatagcatgtaaccacaacgaagctagagcagtttcaataaagtaatgggggcaaaatcatattaatattatggagggccaagaaaggaggtgaagtaatagaaacagagaatggggtgatatctggaaggggctcaaaggtaagattttttaatgctcagatgctaatggagtccatggagaagaggaggtagaccacacttggtaagtaaattatgctaaactgagacccagccagttatttctcctaggccataaatcacaggaatatcatagtgttttttgaaaactgccaagctatgtggatttcatgcttgttacatcatgatgaagcttggtatagccccttactctctccaaaagtcaatcagaactgtagacttactatttctcaatcaatcaaaaatatatacacaattaaattgaatctgatctttattaccttctgagagacacttgtgtttttaaatctgctggcagttcagtgttacacagattttcttagtgacggtttctatgaaaacactttaaaatgcaatttactgctgtgatcagtaatgggggaggctgtaaaatttccactgttctaaattctactccctttgctctgtcatgcctggactgtcatttttgtaaaccattgtcttcttgttggaattttctgctggagtgtacattgctgttgctagtgttttattcgatcactggcgatgagttctgttttttttttctgatatcgagcatttcaaactgttccctaatgagtctgcctctgtgctccagtgctgttaacttcaatagatttcctattgtgaggatatgcttccaaaaaataattgacttattttccttagtgactttccatttttatggaattttcattatttctaaaattgtggattttagtttacctacccagaacttctctgatacaaatttagtttcaaagtttaagtggcatttgaatactggggacttgagaactttgatgcatttattcagcaaacatgtattgagaactactgtatagcagcatctacctcggttttgaggttccaactcacataagaagttctgcacgaagctgacatttgagacagagtcagacaaagctatgattactattcagtgagatacgtgacgaatattgctatggtatcatagaaaagcctttctgaaagtaacaatgctggagttaggttttgaagaatgcataggatttagctagatgaagaagggagagagctaagttaaaagaaaaaagaaaaaaaaacaggcgtgtatctattttttaaataggctgggcacggtggctcatgcctgtaacccctcagcactttgggagcctgaggtgggaaaattgcttgagcccaggacttagagaccagcctgggcaacatgatgaaaccccgtctctacaaaaaaaataccaaaaaattagccgggcttggtggcacatgcctgtaggtcccatatactgggggtcagaagtcggggtcggggcagttgaggtagatgaatcacctgaacccggaagtcaaagctgcagtgagctctaatcagaacacttcactccagcctgggtgacagagtgagacactgtctcaaaaaataataaaaataaaaattagtctatattttatataaagaagctgggagtctgtgaaatgagttagaaaaaaatgatggcagggagaatgcttcacttaagaataccaatcttctcctagaattatagcctccattttgtcattcaatctaccatttacttttgctttgatattcttttaaatctcagctctgttcatcatacctctcttgagaaatctttagtggctcaacattgccttcggatgatagctagcattcgagactctccagaatctagcttgagtgtcttcattaatttagggcctactgatcctctcaaaaattgaagtactcgttgttccctgaactcacttctcactttcttatctccacctctgctcaggttataccttctacttagaatgctcttcctttctgtctgccttttctgccatatcttagaatcatacctattcttagaacctaaaatatctgaaataattattagtatgttcatgaataccaataatgaaagtcatttaaaataattattaaaataattttaaattcagtcattaaaaagaattttatgggattattatgaaaagatatattgctagataaaacaaaagggatataatatagtatgtttaatcacattttttaaaaataaactgctgagcaaactttaggcatattcaacctggtattaacagtcattatctctggccagttgggtaaaagctactcttctccctacccctgttttggcttttctatattttatcagtaaacttcttgtgcttttacagtaagaaaacaaaataatagatgttattttcaacttttaaaatagttctaaaaaccctactcttctttcaagcggctcaacttagtctttccttcacagattttcctgccattcaccaatcagaaataatctttaccttttctatcacatatttttgtgtttatagcagcatctctcattctatgattatattttaattacatgctagaactcccacagtaaccagttggtaccatgaacagggatcactctgttgaatgaatgaattcatgctgatggcaatttgaagtagttattttctttaaagggcttaaaaccttattagagagacaatacatgtcaagaaaaatataaaatagatgttaatttataagacaataattgtcaagtagtatataaatgtggggtgtatagtacggtcagtactaaaggacttctttaaacactgtcagtagaatcctctttcataaaatgagattcagggattatggctgagataggtgccaaaaggaagtagttttacttggaaaaatacttcaggaacatttgaaggtcaaaattatgaatgcagaggcacagactagagtctgcgaatagtcgcagcccaccctccccaggcctctcatagaggctctgcacaaaaatagtctgtggcagcagtaatctactaagcagatgatctgcactgataaaaaaccattgactagttttgatttacctaccttttctgttttcttagtgatggttattaaagtgacaaagagaaagactacatttggtgggggtggggatcccaacttaaaccttgtaagagcatctgctgggaggaaagaaatgaaccagagatatctttttgtctcaaatcaagtaaatatttagtgaaagattggaatgtcattcatgcttactacattcagatgtagtataagaaaaacaaggcatcccgaatagatttcttcccctaaaattaaaaattagcctatggaactatacaggtaactcttaggattcagtcagattccagacttagtgatactgactggcacatctgcagacttcatgggaagaaacagtgatgaatcaaacgacagggatgaaaagagattcatgaggcatcctgtccaccaggaaaccttgctgcatcctaaatgcaaactggttcagttcattttctctcatctcctttctctattagtatatcaataacttttcttgaagaaatatatacataattgcaaatggtgttgtcagtgtttcataagaagaaaattcctgttctggaagcatccagtcgtaacttgctgtgcaaaatactatgtcttccctactttattcattcttagagctattaaatttcggttctctgtgctaaataaattcatccaatcctggttcaagtaacctccttcttaggtctagatactgttttcattactgttgcctttaattttgtctaattgtaaaatgccgaagtagacacaatttggcagcccttgagaagcactgcctgctcttctctgagtctgtttttgtaagcagaatgtcaactgtctgggtcatagaagaagaaacaaaccaacctttgggaccagaccaattgtgtagctgtataaaaacacctagagaatttttctatctaaattctgaatttaagatgaaaatagacctctagtacctgaactttctcttgggaatctgaaagactgatgacggatgctacatgtgggagttggagaaaagccacaccttgatatattatcttattctttgccattcttagcataatgaccttttttcaaattctgtctctccaaggtgcactaaaagcttttgagtacttgtcatacataaacactaaatgcaaagatcaagagaaagtaatgtgtaagattaaaaataggagcaatggcttaaagtaagatgctgaatgttgttaatgtattcctcttacagcttcgttgtttataaaaggttctttatttaaatatccttttcaaatagtgtctgtaggatgcttctgtaagtaatatttgtagatttaaaattatgaggccataagtatcttgaaatattattttaagttcaggggtatatgtgcaggtttgttagattggtaaacttgtgtcatgggggtttattgtacacagtattttgtcacccaggtattaagtctagtacccactagacttactgggttatttttcctgaccctctccctcctcccacccttcataagcccaagtgtgtattgttcccctctatgtatccatgtgttctcatcgtttagctcccacttataagcgagaatatgtggtatttggttttctcttcctgcattagtttgctaaggatgttccttcaaaggacaggatctcattcctttttacagctacatagcattccatgatgtatatgtaccacattttctttatccagtctaccattaatgggcatttaggttgattccatatctttgctattgtgaatagtgaggcagtgaatatacgcgtatatgtgtatttatggtagaacgattttattcctttgggtatatgcccattatgggtatattagaccccagtgcaaccccaatgtgattgcttggtctaatggtagctctgtttctaggtctttgaggaatcgccacactgtcttccacaattattgaactatttacactccaaccaacagtgtataaaccttcctttctctctacaacctcactagcatctgttacttactttttaatagccattccgactggtgtgagagggtatctcattgtggttttaatttgcatttctctatcaatgatgagtttttcatatgcttgttggccatatgtatgttgtcttttgaaaagtctgttcatgtcctatacctactttttaacagagttgtttggttttttcttgtaaatgtttcttagtggtctaaaatatgtatgtactttttcaggaatgctttactctcaagtcatttttgtactgttaatagcttttaaaacaaatagggaatctccaaatgagtaacatttcatggtataactcagtctgtttcgtaagagttctttcgtttgaaagaattagtcattataatcccataagacagtcatatcattatttggatattaatagaaatgccattttttccatgggataatatcttaaaatacaaaaatagtttattgaattttacttgtactgtgttaccaaaaataaaggccaaaatgaaaagctaagtgccatctagatcctgtttgtattagaaaaggctacattagagcctcacattccccagcaagcctttttctctcacaaatacggtccacaagggtgctggtcttatggaaatgactgaacaaaaatcccaccaagataatttttagaaagcagaaaacttaacttatcctcagaagcattttaatacatttattttctggagtttaacttaaatttgactgtgtggcccctgttttgcaatcccatgtaaagaaatccacagtaacatgccatcccaagttctttattagtaacaccagtaactttataattttatatagttacaaatagatatttactcaggaaaaataacagattcacacaagacttgcatattatatatttgtaagaatcttaaggtgcctatttttttaatcacctttattgcactataaatacaataaaatgcaccaattttaaggtacagtttgatgagtcttgccaaatacatatagtcatgtcatgtaatcattaccacacttccatcatccccaaaagttccctcacactgttttgcagtcagtatccttttcctatctctggccctagggaaccactcatctgtcactgtagcttagatgtttctaaaattgcatttacatcgagctatgatctctaatgtctaaatgatcgacatttagatcatttcattagaacaaaacatatgcagtatgttttgttctagctttcttttttgtaacttataatgcttttcagatctgtccatattattgcgtatgttagtttatgcttttttatttctgagtatttcattgtatgaatatattacagattgttttccaatctccagttgataaacaggtgggttatttccagtttagggccattatgaagaaagctgctctgaatagtcatatgtaagtctttgtgtcagtgtgttatttttcttgagaaaatatctagaaggtgagtggctgggttctatggaaaaaaattacatttagctttataagaaactacaaaactgttttccaaagtggttgttccactttgtgttctcaccaacaatgtatgacagctgctatttcttcatgtctttgtcaacacttgttaccgtcagtcttgagttttagtcattctggtgggtatgtgcagtgatatctcattgtggtttacatttttttaaaattagagacaggatcccactgtgttgcccaggctggtcttgaactcctgcgctcgatcctcctgcctcggcttcctagagtggtgggattacaggcatgagctactgcacccggcctaaaaatttttgaataaaatactaaacatttttttaaaaacatttctgctacttagtgtattctttgatcatctaacataaatatgatttggaatataaggaaaaccttaatacactattctggatgtctgatagggttttagacaataacttcatggcagtttgatgaggtttatttgtctattctatagctaatagattatgaaaacattcagaaaataaagtgaattccttattgcatagtggttgttttgcctattgttgtattagtagtcagtcacccaaatacctaagctgcataaaacctaaaccagttaacatttaaaaataatgtttgagattatagctggaaagtcctagtggattggctcattctttctcagagtcacatttgctcccagtaaggtgttttcagaggccttcgtcagtcttgcttcaaataagctgagcagtgaagcagacacaacttccccaaaatgacatcagtgcctttttaataattagaccccacgctggcatagtgtgttactccataattgctgattgttttcacatggatagaatttgaatgaccctgtcttccattagtgatagtattaagatagtccaaggtggcctccatttttctttactattgttaactaagttgctctttgcttagaaggaggtcctctggtccttgtttaatacttgcttctaatgctgcctactccatttgtgctgatactgctgacattccatctattacatgttttatacattgctcctttctgaatcatgtctatatctgtattgaattgtgtttcttttattcttgctcttaactatgtgtcttgattcttgttgttttcactatatttgctgcatttgccatttagtatcattaacatatctttttcatgaattccaccttttagaaatatggttccttttattctaattgatgccttttcctcaaatttcatttcctgatagcaatattgtcacaccttctgtttggtagcatatactaaacagtcttgccttttacatcctaatccttattttcatgtatgtgaacaggagagcaactttggcatatttttacttttcacttcctcccttccacttagcatgttgacgccatctaaaattttgtctccattttttaaacagatgaatcaacaattatgtagtcgtaattgtctcacttctttgctcctgtttttcctccccatctcttccccttttgtagattccctttttacattataaggaatagatccttgagtaattcttttttatgtgtgctatttgatgatgtattatttaactaggtcctatcagaggaacataaaagttccatgaggacatgaattcttgtcttttgttgttccctgccttgcctagaacagtgcctggcaaatagtaagtgctacatatatattttttgaatgaataaattgtttatggaaacaattataaattgtcaatcacatgttactactttctgacaccaggtatacccctacaagaggtgatcattattgatgactcagggtcctcattatctctattgctctaatttgagtgcctctaaattaaatagtttcaatatgccaggtttaaatttttcttctctttatatcagactaaaagtggtagtagtagaatcctcggagtatggcatttgctggcgccagaggtattccaagaagcagttcctagaagatgttaaccaaaggtcatcagatccagagaggaaggaaaggagacaacatgattttcagagggaggaactatcctcagatgagggaagggtcacttttagggaaataaagtgcacaccacacaggtgggaggagggaactggtgtgtgtgtgtgtgtgtgtgtgtgtgtgtgtgtgtgtgtgtgtgtatacacacatatatatcacagactcagtcttatgtacatattgagcagagttggggaaaatctatgactattcatgagggaaatcaggcacttgcatagtgggtggtaaacatatgtaacatacatcccatgttcattctatggtggcgttttagtattaaagtaaggtggaacttggctcttcatgccctgtaattcacttatttgacataaaggcaatttgtgtgcagccttcagctgaccaaaactggctgtctatcaataaacaatgtttataaaacaggtcctctgtctaattggagttatggcaggaccacaaggcaggggaaaggggttgtcagctggcatccagcagtctatcagggttggttgggaaaatttccagctatagttgtttcagcaatgcttctcaggagctggtttctgcttgattacaggaaaacttatggcacaacattgggaccaacccctcatcctgctagccatgagattttctttttttttttcattttctcatgttagcctagccatagggtttccatcttgtctgtctgtctgttggggtatattttaacagagatatgacttaatagcctggcagatgtcagtgcaccaaagcttggaagagggaaaatttaggtttgtaactcataacaagccggttaaaatgagttcaaagttgaagatgagaagccaagacagaagacattattaccccaatgagaaggcacctgcaacagctttctatcaggtgtgaatgagaaagaagcaagtaattagctctgctccctccctgaacagtgatcatttttcttccatctctaaccccaagtctgcccattcttactgttgagctatcatttgcactattaatcaatctgttgtcccagttatctattgattcataaaataccaccccaaagtattttgtcttatagtacagtgtctcaaagtatagtgtcttaacacacaactgtttatttcttattgttctgtcagtttgggtcaacagtttgtgctgggctcagctgaatagttttccactgttctactcaggaatcacttttgtagcttcagtcattggtagccttactagggctggagagtataacataccctcacatttacatgtctggggcctttatgctggctgtagattgagtccctctcattcgacatggtttctcacctgggcttctttacatggtatcaggaatgttccagaaagacaaaagttggaagctgcaaggtctcttgtggcctacactccagaacttcataccatcacttctaccacattctgctaggttagcctagatacaaaagggtagagaagtacaaaatgttacggcttcatttttcatatcacacctgtgagagcctacctctcagcattaccttcaaacttgaaattttcaatattgcaatttatgggtttgcataactatctcttcttatagaattgaactctttgagggaaggaattagtttatctatatctgcagtatataacagaggacttgttatgagtaagatctcaataaatgaatggtgtgccagctggttgatacgtacatacatatacatgaatgaatatcctgttttacatggctaaattctgtgattataagattaacagaaatggtactttgcaaaaactccaaagtaaattggaagtatgtcttttccattttaaaatagtaggggtttttgtgtatatgtcagtcaataaccatagaatgcagtgttcctagaacatacaaattcatctgcataatagagacttagtaatgtttcctgattcagttcccagatcaaataaccagaaatgatcatctcttttctacaccatcattgtcaaatatgttggaccttttatagtccaagttacattttgtctttggcgtgtatttaaggtcagattcattaccatttgtgccaaaataacaaggtcttaaaagtagttgcaaatgtagacccaaattactttgtaactacagttcttaaaccttatgtcagaattcctgagggccttctgccagaattggagttaacaatgaatgcaactatattgcttgatagtaaaaatagcctactagttctgccccagtgtaaccttaccctatctgaatgggagtggtctgagggggaggtacttgtggactaggattgttgcctatagtctagacaagcagggtagtcaaacctagtgtcccttccaaaggtagaaaagtttcagtatgaatgaacagaaggaaaaatagctgagggtaaagaaatgaacaaatgaattatatgagagaaatccaatattatattaccttaaaagaggctcagagcaagagatgacactgtctcttagcttaattataccaaatgcctgaaagagtgaacctgtatgttttctgagaccactcctgctttggaagcctgcaaacctgagtggcctcactttaggagacatattcatacaatatgatggactggacaaattacagtattaatgactaaatgaattctagtaatgtcccggtatcttttaagtcatatattctttggatgtaacagatcccgttagaagactgggagttgactgtgatattgtgaaatatatattggtctttgtccccttttcctggcataaatgacgtctttttatatgctaatgagttgactgacagctggcaacccctagggagcttcaggatggggcctagtcaccagaaagaccaaggcatgactggagggttgggacttttgtctccatcccccaatctctggggagtgaaggagggctgaaagtaaattggtcaccagtggtttaatcagtcatgcctgtgtattgaagcctccataaaaacccaaaaggacagtgtttccagagcttccagatagctaaagatgagggaggtgctggagggtggtgcacccagagagggcatggaatccccttccccatacctcttcatttgtattcttcaagatattatttatcataaactggcatgtataaaaaatattttgaataatctaaaaggcctactacctaacagcactaaaatgaccatttgatgtttcacagaattttaaaatcctatgtcttagttcttacataagtaattcacattgaatttcaccaagatcctatgatacccacttgcctacattgctgtacactgttgctgaatgctgtcaagcagctgtcacattattcttcctgtaatttggaaattgctataaatttgccaaattcttccaaacccttcaggcatgataaattttacatttatagaaattattttgtccacctggagtctttcagacacttttatgtaactgtggtctgcaagttagtaaaagcaaatttcattaagagaccaaaaggacacatgtatatgcaaagttaatatttgctcagacaaataatccttcatgaatgcacaatgcagattttttgtggattacatcaaagaatcacaaaatgaataacaatcatggaaggacattgggtgaatattttaggtaaatatttttaaaaacctttatcttgtagagctacaagaaaagtagctatgcatatgaaatcaagtcttaataccataaagtcttatcaaatataatgcagaattaaattgaacaaagataaagaaagctttcctgactatggaaagaaaatatatagagacagaaaagaaattgaatttcagatctttgtttcaagataaaaatgaattattataaaatagacctgtattcataacttagactctatttcagttttctacactgcgagcaatcataggactgaagggaaatttattataaagtcacctgggatattacttcataaacatagaaagcaacattagaaattgaaatgggaataatgaaaatttcattttaaaagaatgtaaatgggaggcaaggaaagaactgctgagatacataaaaaagtcattacttcttttgaattcctataaatactgaaaactgttttccattaacagaatactggtgctacaataaatatatttcccctttgtatgttgggaccaaaactactctaaaaatgctttttgtgatgatatgccagatgaagagtttgccatttgccacccaggagtgtggcctaggagtcagaaaaccagaggtaaatgtgcaagctgaccatgtagctgtgtctggttgggagaatttaggggacgtagtccattattggcactcttggtaaagtacaaagtcagtggcatcccttgtacaaagaagaaaatcttgcaaagagttaaccactgcagaacattcagtatctaaatctaggtgcattccactataattagggtgtatttattcattagtagctgaacattttgcagactataaaaatttaaatgttcttgaggctcattatggcaccttgtgcatcacagattacacagttgctctgtatctttatgtgccttttatatcttaatttaggtcttagtgtgactatgtatatcacttcatgaaattataaaccataacaaatgattatggaggaattgttatatgcccttatagaaaatagaatagaaaaaaatgcatattttagtcctcccaatatattcttattccatagcctaagtgccaagtcaggggctttatttcattcatcttaaatgggaaagaaaatagttcccaggaacaaaatggcagaaatctatctactcagggattaaagagtataacttttatcaagataaaatgaatagtatttcaaagaaaccaaaagaacactaaacactgtggaaaacaaagaactagagctttggagcaaaacagattccatactcagccacttaccagctatgtgatcttgggcaagttatttaatctctgagcctgtttctgtatccatatacaaagacatctatgcctctgagtgtgattgttaggattagggataataggttaagttcctagcattgtgcctgacacataataggtgtcaatcaatggttaccaatattcttacagggttgggaagtgtgatttcttggttgtaacccacagttactcagcaaaggcaagctagaggatacttccattgctatagttgagctcctgggtagtggaaatcttttaacttaccctctgagtgtgacttgcattcattagctgctgacacccactgttgtattgtcaacatggaaagctctttgccaggaccatctaccacctctgtgaggctagattcatctggctagttacaggaagacagtgcctttaacctggagtatacaggacgttagagttgaaagggtcatatgctagccaccagctggtgcaccatggacccgtggttcctccaaattattgcaagtgttccaagtgtctattcagcatcacctgatacagaataatgtcttgcatatatctatctatgtgcactattcttttactgttgtgattagtagagtgtaaattcacttcaaaacattgtcaaattcttagtagcttttcatcatgttgtatttttgctgtcagccattataaaacatgacatcagggttgatgtgtggtgcaaaggatcataaaattgttcgacatcattcagcagccctcatgctcagaaaatcaagaactggtgctctcatttccagggtccaggaaaatatggaacacataagcttatacagcttattaaagaaaacactgggtgaaaactctgttaatccctagtccagaacttccaacaatgcaaatgtttgtatcactgcttatggaaaaaatctgtggaagtatttagtgtacagattagtatgcatgaagttgagtattgaaagagcatgggttatatgaaagacatttaaaatggtatctggcacatataaaggactcaataaatgacagccattatcatgacggctattcagtaagaagtggttttgtcacttttttctgtctgttgctcaggtaacttattgcatccaagtataacattttaagttatgttatttgtcactcaggcaagtacttctgttttcacttcatagtctcagaatgggagcgggtgtatgttttttaaatctctcttccagaagtcttttaggagtagacgctattgccatcaatactgagactaacttctgagccaggtccttgtagtgcattttattgtagcctcagacagctagtggcctttaatttgtttgcttaagacagagctcagttttgttattaaattacccagtaaaatttgatatgttcatcatcactggccatcagagaaatgcaaatcaaaaccacagtgagataccatctcacaccagttagaatggcaatcattaaaaagtcaggaaacaacaggtgctggagaggatgtggagaaataggaacacttttacactgttggtgggaaggtaaactagttcaaccattgtggaagtcagtgtggcaattcctcagggatctagaactagaaataccatttgacccagccatcccattactgggtatatacccaaaggactataaatcatgctgctataaagacacatgcacacgtatgcttattgcggcactattcacaatagcaaagacttggaaccaacccaaatgtccaacaatgatagactggattaagaaaatgtggcacatatacaccatggaatactatgcagccataaaaatcgatgagttcatgtcctttttagggacatggatgaaactggaaatcatcattgtcagtaaactatcgcaaggacaaaagaccaaacactgcatgttctcactcataggtgggaattgaacaatgagaacacatggacacaggaaggggaacatcacactctggggactgttgtggggtggggggaggggggagggatagcattaggagatatacctaatgctaaatgacgagttactgggtgcagcacaccagcatggcacatgtatacatatgtaactaacctgcacattgtgcacatgtaccctaaaacttaaagtataataataaaataaaaagaaaaaaattttttatatgtttctgtgaactgaagagattaaaacatttacttaaatgtttttaatctgtacccccaccaagttcctttagaccagaatctttattaagaggtttaacaatagatcaatatttatttaaaatttgtgcctggagatttggtatttcatttcacaatgtggcccacaggtgatagggagcagaaatattgactgagagaaatttatatctgactatacaaatttagtacccatttcataaactataaaccatccagattaatcacagtaattaaatgcaaagaaaggtccacttgggtttttcaggtaaatttaagacaagctttatcactatatgtttggttccgagttatctcaacattcatatttagtatgagttctctttctttatctaggaatatgatttctaagctaaagaaaagaatatgtggaatctgcacttgtaaatgtccaaccagaattctcttacagggaactcacccaaggaaatgagataaaagatccaaaagcagcaagcacttctctgtgctgagcatggccattttaagggaagccagatgacttgcagtattttccataagtgattcccattcagtcagctgtgtcaggcaacaacttggttgttttgtgttccagccattaggcagcaacctcattgaagggaatcaccacaggcctctgtttctccagagagaggaatcttactccaatatagtaaatggactcaatggttgaggcatccaagccaccagtaggatcttcctctgctattgagacgaaataacccgatagagaataaatacagcagggcttagccctatacaaatttttttataagttatgtctgcattgttgtccccacccagtgctctgtcataaccttcagaattctcccagtgcccaaattgactattccttaaaagcctacttcatgcctcacccaggcctgctcaaccagttttctcttattttttcccactgtcagaacatatcagccctgtcctcctaatcccttaagactgtgatgtctattcaattatctattcaaataatttctgctaaaatatgagtaagtggtataatatgtacctcccccccccccacaagtaacatacatgcattttaacagtggctttaagtaaatgggaagactgtattctgagcgtcctgacaggtagcaggagagatccttcaagaataagcagtcatttgctctcacaataaatatctgtagggcattgaaccaaccctgaacaaaaaagcacaaattatgctctcactctacatcagttgatagctgcattcaaagaggcgggacttctgttttcatcctcccagaagtctgtggcactggaacagttcttcaaagagagagaacagacacgcttccataatggtactaatttacagctgcaggcttcctttggggccacttttagaaataagtgccctgttagtaatgggcacagaacttgccagagagaggtatgaagtgcggtaaaggaggtcgcaaagggaagagaagaggtgaggaacagtatgatgagtggaaaacacagtgagatcagcagtgcactgaaatgagaaatgtagggagattccatatttatgtattctgttcaaaggaaataaggtagattctgaaatggaaataagcaacatctgacatgcagaagaagctggctagccatttattttttggtcaatctctgatcccatcactttcagctaaatagtggctatggtattgccttgtttttgtttttgttttttaaaaaagggctcaacataccacctctattgccaaagacaccccaccttgcccaacctcagtttcttggtgtgctctaagagacagtttatggttccacttctgttactgtgtgcaaaattttgccagaaacaggcaatcctactgtccttcatcaggacactcatattgtttcaaagccgttggtgacatttggctgcttcattagaaaacagatttttatatgtgtattatgtaggttgttttgttgttttttagggggcagggagggagtctgaagtgtcacttcctttcctaaaggtcatccattttggctcttatttaaagttcaaaagttatagccattggccatgggttaaggtgtgtgtcatttgattacattctgaaagagaattattagctaaattgagaagcatagtaggtggctaaaattacagactctggagctgcgctgctgggattcaatttctgctttcctccgcttacgggctttgtgaccttgggcaagttgattagcttcctgggcttcagttttatcatctataggaatggagatcataagtacagtaatttctgagtgacttaacgtataaaaagtgcttcaaatagtacccagcatatagtaaatactatttaagttggttttaggagaactaaactgagtgtcttttatattcatgtgaagagaaaattgtcaaatttagttgaatctaattagaaagggaaaagaggcagattccccgatgcattgtttctgaggctaaattcaagtcttcctatgatgaacgtacagttttgtatgtgtgtgtgactaacatttattgacactgactactttctgtttaagtggtttatatatttcatttaattctcacaaaaacctcatgttgtaggtacaattattatccccatttcacaaatgagaaaactaaagctaagagtaagtaaatttccaaacctccaagagctaataaatgatgtaatacttaaaagttgatgcttttaccatatataaaaaaggattgaagacttaaaataagatctgaaactataaaactacttcagaaaacataggagaaatgcttcaggacattggtctaggcaaaggttttatggctaagacttcaaaagctcaggcaactaaaacaaaaatagacaaatgggactatattaaatttaaaagcttctgcacagcaaaggaaacaatcagcatagtgaagagacaacctgtagaatggaagaaaatatttgcaaactattcatctgacaagggactaaaatccagaatatccaagaaactcaaacagctcaacactaatcattatggaaatgcaaatcaaaaccacagtgggataccatttcaccccagttagaatggctgtcatcaaaagacaacgccaggtgcggtggctcacacctgcaattccaacactttgggaggccgaggtgggagaatcgcatgaacgtgggagatggaggttgcagtgagccgagatcgtgccactgcactccagcccaggcgacagagcaagattccatctccaaaaaacaaacaaacaaacaaacaaataacaaatgctggcaaggatgcagagaaaaggaagctcttatacactgttggtgagaatgtaaattaatatatatattatggaaaacagtggggaagtttcttaagaaaaaaaactaagagtagaacatatgatccagcatatttgtccaaaggaaagaaacccagtatatcaaagggatacctatgtttattaaagcactattcacaatagctaagataaggaatcaacctaaatgtccatcaacaaagaaaatgtggtgtgtatacatacatgatagaatactatttacctgtttaaaaagaatgaaatcccgtcatttgcagcaacatggatgagcctggagtacattatgttaagcaaaataagtaaggcagagaaagataaatactgcgtgttctcactcatatgggagctaaaaaaatcgagctcatgaaggaagagagcagaattgaaaggtacaggagactgggaagggtagagaggtggggaggatggaaagagattgggtttgtagataccaaaaatatagctatatagaaagagttctggtgttctgtagcagtgtagaatgaataaggttaatttattctatattctcaagaaggcagaagggaagatttcagtgttcatgacacaaatgataaatgtttgagatgatagatatgctcattaccctgatttgatcattacatattgtatacacatatcaaaatatcactgtcccataaatatgtacgattattatatgtcaactaagaataataggggaaagaagtaatggaaccgtatactcgcagttgtcaacaaaaaaagtaaataaatctgccaaggagtacacttggcctgtgtggaggaaattattaacattttctgaaggacatcaaatgatattagaataaatgtcagaacaagaaatgtacaattaaagtcaggtttgtaaacaaatatatacatgtagtacaagtttttataataatgtatgtatctaaatgtataacaatgagtcaaatgaaactggcaaagtctgatgggaaacgtttggtcacattcttttgtgtttaaatttttaaagaacatgtatcagtgtataagtgatataaaaattattagaaaataacgtaattcatgtatttttaaaagttggtgcttttaactactgtaatgtcccccaaatatgcttgcagctaactatataaatacatttttataataattatcccctttttatcagaatatagtagagcaaatgaaatatgcttcatttaatcctcactccctgggttgttggttttatgccatgtttcagccagaatcaggaaactccagggccttaaagaggttttctcctcataagtgctagtagttatttgtggctcaatattatccagacccagtgggaatagtttttatgccaaaaaaaaaaaagcaaaaatttctctaactttttttacataacagcattgcaaaggagaactctggctcagcctcatggtgattcctggcttactgtacgatttgctgtaagagtgaacatagccacagaacaagacgtgcaccattgtgctttctagacagtgaagaaaatttactcatctccattgcctgctggccttggcattcctgtaactgctctctgttcttatttaatccttaattaacctgtctcatattatgtatgacttgtaagacacctctgttacacactcagaagtttgaatcttcaaataagattactcggcagacataaatggaacatttccatctccttttggcagtgagcagcatttgctgttatatccctctgcatgtggtgagatatagctgtctctgatacctcaggtgaatgacaacaccagcctattatgagatttctcacctctgaattcatgtaggatttgcagtctataacacacaggttcacactgattgttctctagcacttttatgtgtgaagaggctgggagtactagtgtgtctcccaaagtgtgactcagaactgggcaatagtaggcttaataaagaagagaatagagagaaaaggaggaaaagtgtatgattgccttatctcccaaattagattgttggcttcttagcccagacaccatatccttttttctgtctcctttaatacttattagaatatttgcaaactgagtatgcagtgcctgcttatggcctaaaggcctaaggttttatttaatgcatagattatctcaaaaagatcccatttccactcacttgaacttaatgcagcccaaaggaagtagcattttctgtaaatgttattgaaattttatttacactgaattgaggtatctctaaattagttttagattggcctctcatagaaccgtgattctcatttcagaggacaaatctctaaactggtgatgcaatgaagatagttatgacaacagaagtgtatgtagctataaaacatagatattactctgaagaaagtactaacagtgaaatcctatacacgactaaagtgttgcagtgactgaaaactcattccgaccaaggatgatggcatttggcccactgactagagttgggaggtgcatactatattgccattgtacctctgccaaaaaaattagttgactatacatatgtgggtctgtttctagatcctctctgttctattcaattgagctacaaacatttctaccaatgctaaactgtattgagaactgtagctttctagtgggatctgaaatcaggttaggtaagtcctacaactttgtacacctttcttaaaattactttattttagagcccctcatttccatatacattttagactccatttatctagttctacaacacatcagccagaaattttggttgtgagtgcattaaatctatacattaatttgggcagaattgccatattaatattcacatattttttaattaatattcacatgatttttttcagtcaagttttgtagtataaaggacttgtcttttgttagatttatttttagatatttgccttattggaactactgtaaatggaatttattttccagttgtttgctgcttacaagaatactttgtgtatttttgcagccttgtaaatcattaattctagttcttgttataaacattcccaaagatattctgtgtaaaaaacatcagattttcaaattgaaaaagacataagagaaaacacaaaattgagaggcagatatcagaaaagtagtaaaattgtttccaagagaaccctttgactagaagtggtgaaaacaggtatccttgctttgacctcaatagaaaaaaatttagcctttcaccatttaagtgtgtaatgttagggatttaagtttttgtgtatgccctttgtcaggttaaataaattccttaatatttctagattgttttaccaatgggtttgaatatttgtccaatgctttttctgcatcagttggaatgatcaagtttttccctcctatgttctgttactctagtgaataacatcgattacttttaaaatgttaaaccaaccttgtgttactaggacaagctccacttggttatttgttatttttgtatatgactgtatctgtaagttccacatctgtggattcaaccatccagagattttttttttaaaatggatagttgtgtctgtactaaacatacaaacttccttgtcatcattccctaaatataacaactattacatagcatttacaatgtattatgtattataagtaatctagagatgatttaaagtatataggatcatgtgcatatgcaaatctacaccattttatatcagggatttgagcatctttggattttggtatctgagggggggtcctggaaccaatcatggatcccaagggatggctgtatatgaatttggttattgaatgtcctccccaccagaaatactttggaagattagagtggtcaggaaagaactctctgaagagagagcgtttgggctaagaatgaatgaagaggagccagctatgcaaaactggaagaacactggaggcaaagcggaacagctaagtgcaaagggtatacagtgcaaacaagcttgcctcatttagggaactcgtcctgcatttggggacaaaaagaagcccagtatggatgggatatattaatgatagggagactggacaagatgaggtgggctagagagagacagggccagatgcagcagaaaaagagttgccaaactctctggtacctcagccactttccaacctttgggaagccctaagaattgtcttatcagagtctactcagtatctactaggcacatgcagctatttaatgtaactaaaagtatataaaatgaaaaattcagtttcttggtcacactagccacattgcaggtgtccagcagcacatgtggcagatggctactttattggacaatgctgctctaggaaagccaaaggagaaataatgccaactttgcttagcctcttctctgtaattttctcttttaaagctagaatcggtgtttttctatttaaatggaaatatatgtggtacctagaaaactagcatgtggcctactccatatgcatatgttctcatggatgttttttacctatgacagaaaagatgaggactggtaaatcacaagcattcttaacctcattataaatacattgcaaatgtaaaaatgcaaagtgtggaaatcataaatgtgaaagtggctttcaatttgttttaataggcgttttctgtgtcttactgtaacctagggaccttgctgcaagaaactgcctggtaggtgaaaataatgttctgaaaatcagtgactttggaatgtctcgtcaagaggatggtggagtgtattcatcttctggcttaaagcagattcccattaaatggacagcaccggaagctcttaattatggtaagaatagaccacattttttttttaatggtaaaaatgaacggcatcagcataaaacattcacaagcaatatttacaggggtagcacagaatgcaagttagaatgatttgaggatcaacacaaataagtgaatttcatacttttaatttgttgaaattattgatcagatttctatatgtaacattgctatattaaaaaggtagatataagtacttttaaatatgactatacatctgagaaagagtttttataccaaaaaaaaatgactttgtaatagattatacagagtaagcgttgttgtggctctggaccatttctttcgaatgtcttataattggtccaataacctcatctgatgttaggttcctaaaatattaagtcaatcagttctttagtttctcactctgaaatcgacatggtttcttagcatctcagtctgtggaactgatataaatcttgagcaaagaaggagatgggaattacattttaaaacggcagggatttttttcacttgaatttttatgcgtcattgtaattggaaataaatataacttgcattatctgtggttgggatgaaatgggccattacaagatggatgacaactcaagaatttaagagaaaaaaaaagtgtgctttaaataaaattagaaattatattttcattaagggaagcagcatatgagccatggattggtgaatgggtatggtatgttttgaataaaaatgtaaaatgattctttgttgatttaaaatgaaaaattacctcattatggaaactaatttgtaaagcatttataaatgccttaatttaattcccaaattagagaaagcttttttaaaaaattgaggtgaaattcacataccataaaattaattactttaaagtgaacaatcattggcatttagtacagttcacaatgttgtataaccagtacctctagtttcaaaacattttcatcactccaaaataaaaccctgtcaccaataagcatcctcctcccattcttccgttccgttgtcccctagtagccaccaatctgccttttatttctgtggatttacctattctgggaatttcatacaaatggaattatacggtatgcgatatcttgtgtctggcttattttacttagcgtaagatttttgaggttcatccatcttgtatcatgtatcagtacttcattcctttttaggactgaataatccattgtatggatatacaaccatttatttatccatttttgtatatttgggcaggtttcaattattctgggtatatactagaagtcatatggtaattttatgtttaactttttgaggaaccaccaaatgttttccagataaagcttttgaatgtaattggtttggaagttgattggggctgacccagctaccacagatgctaaccctcacccttagtttgtctttcagcgtgtcagcaagagaggttctttcttatgagctttctagtgattgcaagccagttccactattccttagaatctagaaaaaatggcagagctgctattttccatagtgattcctctctggggtgattgttgttattaactctagggtcagattatattactaagggggatgatcacaggataaaagatagattataatactcaatatttacacaaaggtttttgttagatgacaaaacattttcaagcactaaggaagctgtaactgggcttgggagtccttgaatttgctcttaactctgccagattctctgtgttatatagcctttaaaagtcctcttactcttaaacaattttgccaagtaaaattctgcctcttgatcacggtatagtttttgaatttcaagctgactaaagtgttgtatttacaaattaaagtttcaattctggatatatctaacagccagacccaaagcattttaagtaagtaataaggacaagtcaagtctaaagattttttttaattgagacagggtcttactttgtcacccgggctggagtgcggcggcataatcatggctcactgcaacctcaacctccagggctcaagcagtcctcccacctcatcctccagagtagctgggactgcaggcatgagccattgcgcccagtctctgaagatccttgatctagagtgagggacttttttagtagactttagtaaattttatgaaacgtagaacaatttagatgacaaggaaggagagattttgatataggagacgtttatagtatttaatacccagtccaatgagagagttcctgaaagactctacaagccttctcctagcaacccagagaagtttagttcccacagactacagttactgaagattgactctaaatcctagcgtgttttttttttttttttttgagatggagttttgctctgttgcccaggctggagcgcagcagcgcgatctaggctcacggcaacctctgcctcctgggttcaagcaattctcctgtctcagcctccccagtagctgggactacaggtgcccgccaccacgcccagctaatttttgtacttttagtagagacagggttttaccatattggtcaggctggtctcgaactcctgacctctggtgatccacccgccttggccttccaaggtgctgggattacaggcgtgagctaccgtgcccaatccaatacttctttcatatatgaaagcagtatatactctttcttcactcttgtctcactcagaataggtgaaacactcaaatctcccatgtagtatggggtcggggtggatgaaagaaacctccagtccaaggaacctctctgaaactgtcttagggccacagagccatgatcatgccactacatgccagcctgggcaacacagcgagaccctgtctcaagaaaagtggggggtggggcatagaattaaacctgttgtcactgcgttatcataagtgttgtttttgtatatttggctttaaaaagaaaatcaagcaatactaaagggccttcccagccctattgctagccagatcattttccttcctagatgaaaatactcttgatacagtctcatactcttctcataagtggctgagaaatctttttgtatgtgtctctctcatatactttaaaaaaaaatacaaaatggtagaatactcaacacctgtttggcatatattgctaccatccttagtcacagctgtcaccaaaggtactgtttttataaggggaaaatagaatactgatctccaactaagaaatcataaatcatctatttatcatcaattattgaacagaaattttccttttgtcacctgggtatttggggctgatatatcctctaattagttatattagcatgatgtaactaagtactgtgaaatgggagggaggcagaatttttagtgagcaggtttcccatgccattagctgcgtgaccctggcaagccatcagtttgtaagataagaacaataggaccttttccctatagagtattatgaagatcaagtgagacatagaaaagtagccaaatgctatacaattgtaagttactcttggtctgttaaaattacccaacaaaaccaggttcaaagatccaggtttcagagctaggttataagcttttacttccagaatgtgatcttgctttatatgtaatatgtctttattgatctctgcccagatattatcttacaaaataagatatgagtctgtataacctacattttcttaaagaattagtcttaacttgtagccatagaatgattttcatgaaaagtattaaattattgaatgccaagcatgaaatgataggcagacaagaaaattaatcttccacccaaaaatgtccataattactatctatctactaagaaggacgctacttcacacagctggagctgataatcagttagtacaaccccactctgatgtcagagcagttattatagcaggcatactctggttttcactaagtacttttttttctttttttaagaaaggccatcctgttttaaagtaacatgacagttttggaggaggagtatttataaatcctgcagtggcagagttaagacaggaaaccacatgagggatagaaaatgaaataacttaagaaatctttaacaccactgtaaatggagtttagttatgatagtatatgtaaaagtaaaaaatacaaatatgttgggaacatcttggaaactcttagcttcttggagaggctggagattggaaaaaactgatctgcttcccctcctttattccacgtccatctccagaagacaaccttgtgctggtttgtatctttgtgcttctctaggagactaccaaaaaaattcttagagcttagctcatgtagctcagtaaaacaggtgcacctaggtatttcaacaaaacaaggcaccatgtgatttaaagacgtttttgttagccagctatgttaatttccactgtttaaaacacacataaatatttttcgtaaatgaaactatcagagaaaatgagacctttaagcatgtaagaacatctgtaaacagcaatgagtgaaaaaatgaagaaactttcctaattgctttaagtttgtttgtaattttaatggaaagaaaacgaagtaggcgtaagacaaaatcgcaggaatccaacttggttaatctcctaggattgataacgtaaaaatgtatatctttttaatataagccatctatctcattcagataccacagagaaagtaagcttgcacactggctgaatatttattcttggggggagggagagtgatttggaggctagtttgattaaactagcagcctgaagaatatttatttaattggtaatattactagacctggaatgtaaaaccagtaaagagaataggaagactgcatgtcgaactcatttggtaagtttaaatacagtcatgtatcgcttaatgacagggatacactctgagaaatgcgtcgttacgcagtttcatcattccatgatcatagggtatacttacagaaaccaagtacacatctaggctacaaacctatatagcatgttactgtattgaatactacaggtcattttaacacaatggtaagtttttgtgtatctagacatagaaaaggtaatgtgttatactatgacattaccatggctaccacatcactaggcaataggaattttttagctccattatactgggaccactgtcatatatgtgctccatcattgaccaaacatcattatgtggtgcatgactgacacagacatacataaccaggaagggtcacctacttgtctactgtgcctcatgtggttatggttgttgttcctcttccagggagatacagttcagagagtgacgtgtggagctttggcatccttctctgggagaccttcagcttaggggtttgtccgtaccctggaatgacaaatcagcaagcaagagagcaagtagaaagaggtgagccaagtacattcattgttagtgttcatgtccagccccaggggtaggcagtgcttatagtgtgtctgcttgaggaggggtgtgttaaatactgtttggttgtgttatgagaccatctctggggttcagaagcagatttatctaacatctctgctctttatccaaacactttgaaggatttcaatgcgagagagaggtatataggcttttcttccaccctttccctgtctggcatgacagctgcaggattgtgctgttcactgtcgttaagagaaatagggtggtgtttctcaaactcttgtattctatgccagataaacctccttttaaataatattcccaattgaaatgcagttagtcttcaggaagtctttgagaatatgacaacattgtagcacttctgaagaaaccctttggggttcctagaccatagatgggaataactaagtaatggtgacaggcttgcatgcacttgtgtagcatacagtctcgacaaaaagaaagctcgtgataaaatactgtgccctaatgtctggtccccagtgaggggcatggttgtagaagtggatgaaggaagatgcctttctaacttcctttctaccttctcctacctttacacactacccaatgcactgctgaaacactgccaaccaacagacggtaaaagaatatgactcatattcatttttatttccctattgaattcacatttataaaatcctcatattgaattcacatttataaaatcctcatcttctcttcatcttgaaaaacacagatgattttttaaaactgttcacaggatctaattctgaaagtgaatacttagagcaactaaaatatgcatttgtattgtatcttacatcagactttctgagaaatgaacaaataaaaaatgttctttgaattagaactctaagactctgtaatattgaattctgcatcacctgtagaaaataaaaactcagcctccccagaaatggatgttttgtttccatataactacaacataaggtaccaaaagttaataactgcataatgccctgtgtgaacattttgtgtcttacctccattctaaattctgttctccttctcttgggtcttcaggataccggatgtcagctccccagcactgtccagaggatatttccaaaatcatgatgaagtgttgggattataaacctgaaaatcgccctaagttcagtgaacttcagaaagagctcactatcatcaagagaaaactcacatagtgacaggatggcgccaaactcagccttcaggactctgtcctccagcagagtaacattattgttctcattaacaatgaatttataccacattaccttcgacagtcttctaccattattttttattaactgggtgttttaaaagtacgttccacttgtaaaaagtcaaaggcaaatttgttaaagaaataggcagtcctaccaagggctttcttagctaaccatagcaatcctaccatttcaggccattgcaaatagaaaagcacaggcttctaagtgtgtgaaggataaaagatctatcctatccttttcacaccttgtttctacttcaggcacagtttgtaggctgccatcctatgccacagaccctactccgttggtgctataaacagcattggtaatgccatgtttgcaggacatgttccaaccacagctggctttcacctctgccaaagcaggattatatttgtaaacaaacaaacagaattttatattgggaattatttggacctcctgagatttttcttttctttcttgccaggtataagcccaatgtaagaatcatcatgctcctacattatttgtaaggttgtcattttcctcctcctttgtctgggcatcagaaaacaatgcacgtaggtcgggcacggtggctcacgcctgtaatcccaggcatgtaatctcatgcctgggattacaggcgtgagccacagtgcccagccccctccctcctttgggaggctgaggcaggcggatcacctgaggtcaggagttcgagaccagcctggcttgcatggtgaaaccctgtctctaccaaaaaaaaaaaaagaaacacacacacaacgcatgaaacgtcgtcaaagttagagttgaggcagttgcttttcaaggatgtacagagagctgtgaagcaagaaacagatttgaacaggagggtgggctggagaacagagcagctaaagaatgattaacagagtaaagaagaaagtgaaaatataaaaccaccttatcagagttatgcctttctaaacatctaaacaaacaaacattcacatattctattctaaaaacacataataatacatattctattttatggtctgaatttaccagaaaggtcctaagaaaagtttcaggagttcgtagagtcctcgtaatggcaacaaaaattttgagagaaactgcaaagcacaaatccacagaaataacagcatactttcagttaagcattttcaccttagagggggcattccaaaatgtaatttcctttatttgtaccagtttttagagctgtcagaatttcatgattctagttcaccaacacattcacgtgtgtacatgcgcgtgcacacacaccaccaaggtgcaagacagatgtgaatgaagtagacagtctagaagtcaggtgaatattaatgagaaatatgacatagggacagccctcccatttctacttccaccttcattgaccattatactgccccctggacattcttaccattagctgacaggtatgcaagcagagtgctgaagatgtctcatgtgaataaaatgtaactcactcactcagttaaaactaggattctgtatcttaactcttatctagggaacttacttacttaccccatgatctgtatatagttgcctctcaggataaatgcatatatagaagatggtcatgctcagggctaaatatgttctggaagccttttataagttctcaggcctgtgtcctggtaaacattaccttagtgattatttggtctgcattcattggaagagcttagggatagaaaatgcctcctgccctctccagctgtttgctgcctgtaccatcgcacagaactcacaccagtactttagagtatgaaagataatactgaagagaaaagtgacttgtatctaacatttcaatctccttgcagatttcatacatacttaatgattagtacattcagactaaagggaaatttcttttgatggcacgtactatggtaaatcaaagcgcaaactcagaagtgctatggtattgaggcacttaccaaccttcaaaagtaagagtaaaatgggatattcctacccttttttttagtatttctaagtgaatctctgtaatattctttgtctgtttaaagaaaacagcctcccatctcatagtggcttcatgctaagctctcagcaaggagagagaatgatggttttggctttagttttatgaacaagacctaaagcttaatcctgacattctggtgttaagaatgaacacagcattgatatttcacttatccaggctgttagaatttgcagttcacatcattactctgtgcttaaatttaaaaagcttttcaaaacatcgtgacatgtgtagcatttaaattccattttattctttgtcctaaagcaggcagtggtatagttcaggattaataacttattgggagtctctcagtcatatagaatattaaatttaatatagtcacatgcattaagaaaaacttacgcaaacagtttttcactgttaattttgttgtgcttgaagcataatttattcatcccttctgtcactgataattaattattggaattatatactttaggaggctaatccatgcccaggaagcacgaacatactgttcagaatgtgcaagttgatgtagggaaaggaagattcagaaatgtacaaaatcctgtgatttgtttagtaagaaaagagttgtaaccaaaatttcttctggtccggatgtaattagtccagtcacaaatctttgtgttgttaatggattattcaagatatatatatatattcttactactgcatagttcctctcataagtccttaaatttattaaaagggggaggtaaacacaagcagtctgtgtctcactggtcactaaggggcctttatgagacagtttaggttgttcatcatttcacaaggaaagaaatttttcactgttaaattaacatttattaccaacatgtgaaacctaaaattaattttgcattccatgtaatctaaggccaaagccaacatattctttctcttctgggaaaataaaattgacaggttttgtttaaacttcagaaactgaagctttatttcagcctgtcctgccatgaggtctccagtgagaggtctccagtgaaaggtctcatgtaattgtttctcttttatctcccaaatttaatgtgggcaataaaattctcctttcgtaattcactgttttattacaaatacgatattactgaaacatcttattagcagataagtatagaccaggagcctaactgtgttagatattttcagtgcacatttcacagttgtttttcattttaggattattttgagaagaaaaaatgttttgtaattgaaatagttttaatttcctttaaaccataatttggtttttctatctatattatattcagttcagttttcccatataacttttgtgaagattggctagtaccacaaaataactatggcttcacaatactagtgttagattatgtcaagaagaaagtgttttagttacaacatacgccacccactgaggaccttgtagtgggataaacaaaaattaaaatgcaacaatccaaataaattataatgtaacaatacaaatatctgaatcataagtcacagtttttcagggttctttcagtcacaccactttataattaattctggtgagtcatcagatgtaggaatgtacctgaaaaccttacttagtatactgtgtacactgtttaatggccatgcatcttttgaagtttgatattttctgaaaaagcattgtttgcctcagccctcttctttttacgtatactccatttatcattgatattttagatgtttcttatcaacaaaattggctgccctggttagtgctgagtcatcgcaagacttgcttttgcatttaggaagccacaccctcccacaaaacagaacagtgcaaaataagcagcagagagacagacagttggaaaagacatgttttctttaggtattaatatcttaattaaatggaatcagattttgtatggaaatgagtttatattacatttccattatactaagtcagtgtgaaagtttaccatcaaaatagcgttacttcttttatgactaactctgatttgcttatacatatcagaatgatattcattaaatattttaatttcatttatttttctatgttttgattagtttcacatcaagtctgaatactatattttggaagaatccaaaaccacatatgaagatactgattttaaaagtcaggatttcatgtaccaagaatgacctacttgaaggagattttgctacactcttagagtcccaaaaattcccctttaaaaaaaatgctgtcctacagaaggtgtataaactataccttagccataattcaatttaatgaaatactaccccattaaaagccatcctcctgcctcataccgattcagaaattaaattctgaacttttagtgtaggcattaggaatcacttagccacttaataaggactgagattcttgggtggcagaaaaatcctggtgtgctagattcttagtcactttaaactgcatagaagtaatgagcataggcttcagtatatttaataaggtgctgaggcagcagattcaaatgcaaaagagggaggaaccagttattccaaggcaggatgatgcacccccacacagagtgtggaaaaattaaagtgaaacaaagatttggacagtgtcattaggaagcctgaggagaacatgctacaaggccagatcctgtcctatggaaaataaaaaagatcagcagaactaaagcaaaagcagtcatctccagtgtgtgggccttagcaaagagtaaaccaaatacctctccttgtgttaggagcactgttatattcccagctcagagatgattgtgtgctgggaaatgcttatattcattatttcccaactaatgcatttggacatatgtattccagtttttcaaagacactacccaaagcttctttacatttgcattggttatatttaatatttcttaagctaagatcactgattatccacacgttattagaaatctttggttacagtgaggcttaacctgggctaaagtctcctaaatgggactacacttagatccgccctatttcacctttggactaacgttgactaaatggctcctagagttacccacagagggagcttactatgatgagagctactgtggggaaacatagtattcaacagagaaatggaagaatacaagtagcaatgttccttgtcttcaataacatttgagggaaaggaatctagaaatcctaaagcttagtcagggtgcctaaggtaagacacaaaaagaaagagacatccagaaaggaaggttgaaaggaaatgaagggcagtaacaaagcaccaatgtaaaatgacccatagccaacaataaatgcaataacaataaaggaaactaaccctcacaaagggtttgaggagcttcctgctgtgtgtccttaaacagtgcgtgcctcttaagtctctacaacacttttttaaagggcattgaattggacattggtttaatttttacctacgctccctataatctcaggaggtaaccattatttaatcagaattacccttgctctgtttatctgtgaggcctcagacacaacggtggttcagccctctccctaagcagtagcaagctgagtaatggcacacatatgtctaggatagccagcattcaggaaaattgctgtgaacctcctgtttttaattttaatatagaaaaagtctttcaggtttgtgacacgaagacagatttagcttcccacttgtcagcaaatttgtaaaaacctcaaaacaaatgaatatttggaattcactctaagagatacaaatcctgaatttctaactatcttctcaaatattactgaggccagcaagatgcaagtgttctacaaaataatgaactgttctaagtgacagtgttgatgctggaagtggaatgttatgttttcgctcagctgtattcattcagaaagtttttcttgaacatctgccacatgaggtgcagagaatactaccaggtgctagtttttccagtatttgacttctgattactatttccttttctcatctttagtttttcaagattttgctttaccaaaatagtaaagcctttatcatcagcttatattgaataatgttgtaattggtttcaatcaaagtttctcctcaggtacttgggggcccctagccttctaaggaactcccaggcacctacttaacaaggccagctacacactcagtatgtgataagccccatgatggatgcaggttagaattcaaagacctggttggagtcctagatgtggagacaggatgatcaggtcacacttgttagatgactaacactatcagtagaagctcttgagagattttcctaacgcagcaagatttctgtgagtagaggtatcctgggaggtatcctgggaggcagcctattgacttgaccaagtaagctgatcaggtggcctcctctacccactaaagaaatgtgtaaacactagcaataattgctttatcttaaactcctggacatactcagttcttccattccactgttctattgccaataccttttgttgttttcttcacactcctcttggcagcaaatgtctgaaagtatttcaattgtgtaatgttaaggagttttttcatagcttcagaaaagagggcagcaaatatgaagccttaagttcaaaataagtcattctacctagaaatacagaccccagagcacattgcatgaaaatacctgtactctgcagttcctcaaagcagtattcttcctgaaaagccaaacaccacacctattttcctatttgctaagaatcagaataagcacgttgtaaatagtatccaaagcagattctaaaatgacatagtaagaagccagattcaaattgtaaccaaagaagacaatagaaatcccactttaccccactgtcatcagttagaacacccttgcaaaaactgtaaccacttaagcaattcatctgatcccagaagatcataccttcttttgaaagtataggacagatatcagtgggaaacgtcggcgttctgagcaacacaggataaatgtaggagggccttaaaaaataaatctcaattcatacactggagcagcaaaaaactgagcaggaaaggaaacagaatccaaagtcatttttcatatagctgttgtcaaatagtataaccttggtgtcttctttgagttgcctggacagtatttatgaaacaaaaaactaaatgccccccatttggggacggggggaggggttcagacctctaacctggattcagagccttagaggccgagagggaatctggaatctggtattactgagatcctaggtaaaagaaccagcctggcagtctttcccacctcattggtccgtgcttttatttttaaacccaaaagaaagaaagaaacacaccctcttatgtaggaatttcccttttacaaataatttgacctggtagaaataaacttgcctgcctgctcttaaatgccagacagttggaagcaaatgccgagggaaaggtgcccagagccatgcttgataggactttgaatattttctccttaattaaagtacgttgcttgtatttagactataagatgctatggaggtctatcccatgccatgccaatgtgaattgctttgcttcagtaacaatcagaagaccagtccaacagaaaataacttgtcataattccaccttagattctagacctctcatacctgcagtgtacagaatatgtacatgttccaatggaattcactatttttggctttagtgtcaaagagattggttctacaaggttcatctgatttcccataacaagtaaattttataatcctatgattctaaattcaatccccaatatagattctaagcatcaaatcaaaatcacagacaaaggggaactggtcgagaggggtcttagttatttcaaatccatgaccaaagtgtccaaagacatgaaactcttatacctgctgagcatttcactttactatacaaaatgtcagctacccagttgcatcctgtgacatgatcagactgtcaatgtggaccagtggccaggagcatatttatgggccatttctgttcatcattctttacagagcattgaggtttcccactgaaacagcttctttagtcagacgtctatagattttacataaatttacatttaaatgcattaagttagatggcccaattgagcatctgaatgaatatagtgggggttggtggtggtgcaaattctgctggctttatgttatggttttcttcgtgttttttcttggttttgtctggcttcttctggcaagtgccctaaaagactggaacactgtataaagtcatagacatagaaccatatgggaaagcccagatgaaaaaatggaagaataaaatcaagttgtcaaagttccagcaacagccctgacttcttcaggaatccaagcaaattgaaagccaagacaaaatgtacaaatggtgcccatgccattcatttgactgtgggtggccctctagtctagggctctcttagtgaatggttgtggaaatatgatttttctaagttccttccttttccttttgatagatgagtttgagatgatggagtaggagtggggccctcaggcacttctggtaaagacattccacctgcaagcagcattttgagtaaagcactgctgtggtttgccgatttatggtccatttaatgttaggctaaagcacctttaatcatttttgttgttttaagataatgtatttgtgaagtggataaacactggaaatagggtgcttcttctggaaagttcagtgtaaaacacaaacaaggctttggcgggtttatctggctttataaacaagtctgaaaaatggatgaaagctaaatatataaagcagttggttgtctatcttttatcatttttactcagatctgtatttaacacttatttatttgttagtttttacattcaaaagaaatacactttgaactttggctaacattgtaggatattttttaattgtttctacatttttaaagcatgattcatcatttttgtaaacttagatcattttttaattgtcttttcttttccaatagaccagttaccactcatgtgtctgcagaacctctttattgtattcctataataaatgtaaaatatttgtagcaaa

SEQ ID NO: 229 - DNA, 28640 bp, Homo sapiens
  source 1..28640: mol_type = genomic DNA; note = NC_000017.11:56978129-57006768 SCPEP1 [organism=Homo sapiens] [GeneID=59342] [chromosome=17]
ctgttgctgatgctgccgtgcggtacttgtcatggagctggcactgcggcgctctcccgtcccgcggtggttgctgctgctgccgctgctgctgggcctgaacgcaggtaggttcaagcaagaggcgcaccagctgccatgcctcttttttctccaggcgtgagagtttgttactgggtttgtgcttttgaaaacatgtctcttttccccggttcttaccttgtgtaattatattgcttttgaatctcactcttttttttttttttccttaaaaaattcaaagtgctttttttgtccttttctggctctgggtggtctgagtgcttccgttctctcctacgcctagatagaagctgtgtgcagaaatgtatgatttggggaaactgctggtcaatgaggtttccccgattcaaaggccatgattggctgctaaatgaggatataaggtcgttttattttaagctgaaatctgcggtcaaaagtacccttacatcctaccacgaatgggacatttcattgagataaggccctttcttttcttgatcaaaacaaacaagataacatcttcccccacagcgatcttttttggcaaaaaacagatttgtgtttaataggatgacttgcaaattgattttcagcaaaacctctcctagtctgaagcaagcactgagaattggaactggccacaagcttgccttgtgaccttaggcaagttgttgaacagttttgttttccttttctaaaatggggatcatctggcccttaggcgagtgtctgggagattttgtaaaataagtagctctgccaattttaccagtagtcactgccaggcaagggagaagtgcctggggttaggtcaaaaggtacctgcgccttatctgtcattctcaagggagcgcagccttatctgttattgtcaaggacaatataatcgtgtgttacttgtatatagaaccttatagctaagtctgtaatgttttagtcatctgttttgctcctcaggacactttctggttttcttaatcttcattgttgttttgttttgagtcagggtctcactatgttgcccaggctggtctggaactgcctgactcaagtgatcttcctacttcagcatcccaagtagcccggactgcagacacaggccaccaccctggctctttcttatttacaagacgttgtctcattgtcttcctctctactcctgtctctttagctgttgggaccagtgttcttttactgaccaatggggcttgaaatttgagaagggaggaaatagaaggcagaaaactccagtcaccgaggggatcccccccatcatcttttaacaacagcccctctacttttttttttcccagagtggttttggaggaaaaaaaaaaagatgctataacttggaaattgttacgttagcaaaaagtgacaaagaaaatgtatttagcctactcttttctaaaacatattttgtggatgctagaaaagttaagtaaggaaaattggagttaggggattataggatacgtatattaaacacacatacacagatatatatcgttcagtttaaaaaaatcatctacatgagttaggaaaattgccctttttcatatttgttgtagctctttccttgctgtttgcctttttatttttgatttacagaaattttgttgtatagaaatataacaagtttctgttctcacctccatcattgtttcttttgtacagtctctggggtttgcttagattctttcctcatccagacattagaaatatatttaactatatttttgtatttttttaatgtttaaagtttaaaatttaattgcttgatcctcatggaacttatttcgtttatagtgttgagaggacctaaatttctctttttttctccaaaaaaggtaattgttgctccattactgtatattgaatattctcagccccactaatttgtgatgcctcttcactcatgttttttgtttgtttggttggttggttttttgtttttttgagataggatctccctctgtcacctaggctggagtgcactggtgtgatcacagctcactgcagcctcaacctactgggctcaagcgattctcctacctctgtctcctgagtagctgggaccacaggcatatgccacaatgcccagctaatttttgcattttttgtagagatggggtgttgctatgttgcttagactggttttgaactcctatgcacaagctatcagcctgtcttggccttccaaagtgttgggattacaggagtgagccaccaagcctggtgtcttactcatgtattaaatacgatataaaaaccagtatattgcattctgagatttttacttttttactcaaaatataaatctctcttgtttttacagaattataaaagtatttcctgtaatcccagcactttggtaggcctaggcgggcagatcacctgaggtcaggagtgcgagaccagcctgaccaacatggagaaaccccatctctactaaaaatacaaaattagccaggcgtggtggtgcatgcctgtaatcctagctacttggaaggctgaggcaggagaatcgcttgaacccggaaggcagaggttgcggtgagccgagattgcgccattgcattccagcctgggcaacaagagcgagacttcgtatcaaaaaaaaaaaaaaaaaaaaaaaagtgtttcatatttattgttaaaaatccaaacattacagaaaagtgtagaggaaaaagtgaaagcccctggcctcctatgccgctgttaagtttggtttcttttttcatagccgaggttttttccttattcctgcaatgtactggggtggctaaattaccaaactataaaacaaatcatctctagcctagcatggctgtctctaccaggcttggaatttacctgtacattaggcactcttctggagagtgaaattgaacttctgtttcaggagctgtcattgactggcccacagaggagggcaaggaagtatgggattatgtgacggtccgcaaggatgcctacatgttctggtggctctattatgccaccaactcctgcaagaacttctcagaactgcccctggtcatgtggcttcaggtaaagtagcttcccagcctggcctgaggtcaaagccaagtctcctctgtgtggctctttgcttgctttttgggctgatgtctcagcagtgaagggcggatttggtccagcagtgtgacctgggggttcggcgtgcttctgaggtaggctgaggcaatggtatagccaaggaggctaaatcagagggcgagggggttctagccttttgccagagtctctttatatttccagacggtcacaagaaggctcactgaaaactcctgatgatacatttgaatacatagtgatagaaagtgttttgaggccgggcacagtggctcatgtctgtaatcccagaactttgggaggccgaggtgggtggatcatacgaggccaggagttcgagaccaggctggccgacatagtgaaacgctgtctctactaaaaatatttaatacaaaaattatccaggcatggtagcacatacctataatcccagctactcagatggttgaggcatgagaattgcttggacccgggaggcggaggtagcagtgagctgagatcgtgccactgcgctccagcctgggcgacagagcaagaccctatctcaaaagaaaaaagaaaagaaagtgttatggaaggttccaaagcaaagacctgaggtagcctgaccctcccttcctctccatacaatcctttcctgaaccctaacttcttacccccagaaaacctgatcttttgaagggactgctacaagccttctgcaccttcgtgtgactgttgcgccttccccctttccctgagtgtgtttgcattttaaccttgagctctgattgtaggatggaaggcagggagctggttgaaagatttgtagggacaggcagaggctcttttctggcatttctgaaatatctgtccagagatggcccacccccacccggaagaccacccaccagggaggaattaaggaacatggtcttgcctctggaaaatgtaggcatggcccagctggaaccctgggcccctcatcagtaaatagggaccctggtgctcacctccataggatgctactgggacgtcttccaacaatgctggtatttataagcagcctcccaccacctgggttttgcctcccaggatggtcgatgcagactttctggtgagatagagcgaaaatgagcagttttcagggaggggcctttctcttttggaattatcacttgtgccacctctgagggctagagctgaggctcagccccaggtgcggttatgataatgcagaaaaagaacccttgtatgtcagcctggggagccctgttcacctccggtggctggagacaaaggtgcggcacaattggcagggagagccaggccgtggacaagctcaggcctgccgtcaggggcctcgggttttcagtgcctacctgccacttagagccatggcaagatacttcctcctctgggccttggctgtctaatctgggagattttggtggttttcaaactttttgttcatcagcagaacttttcttttttttttttacccccaaatgaaagcttacaaaggggagacaaagcagacaaaagcacaagtgctgaggctgaggcttctcctttgaagtttatcaactgaagagaataaattgctcttcacttacccagagacccaagagagaagaagaaagattatgcttacagaagaaataactaatttagatgaaaaggagatctattttagcagcctactgaggacatggtgctgacttctctcgggggaatctttgagaatcgaagtcatgtcttctgagtgggttagcaaactatgttagggacactttcaagtcttcgaagcgtttcacttggtccactgacacactgactgtgtctcagagtttctggatagccctgggccatgctagcaccctatcccaaagttctagacaaaaaagaggttttacaataggatatattcacgtagaacagaggcttcctccatccagcatctcattgccttttgaggagaggggaatgaggagagaggagagggagaggtcatcttctgctgtctccctggcataccagaagcagaggagaactgagatttctcccacaaagacccaacccctaggatttccagcttttctccttttgctttgatcctacctcatcctaataagtccattaggaaaaaggaacccagctttcattggagggtagatccctggctttaatttattgcatattgcattataaatatttttcaatgttgccacatcatttttcgtagttcatgattctaagtggcagtgtagcattccatgcagtagatgtggtatggttgcctaacctgttcccctatttgggggacgtttgagttgcacccttacttctgttatttttaataggactgcggttaacatcttcatctggtttgtgaactttttactgcttaggaaatcttaagatacaaagggcatatgatcagggggatgtatagccttccaattttatcagagttaggttggtccaggttcaaaacattagtgttgtaaagtctttcccttttggggccctcttgccgttgctagttaccctttagccctgactctatcttgtcttttttttttttttctttagatttccctacacaaattgccctggcttttgttttgcccaaggtattccctttcatcttttttttctttttcttttttgagatgaggtctcgctctgtcacccaggctggagtgcagtggcgcagtctcggctcactgaaacctccactttttgggttcaagtgattctcgtgcctcagccccccgagtagctgggactacaggcgcacgcaccacacccggctaatttcctgttcttagtagacgcaaggtttcaccatgttggccagggaggacttgaactcctctcgaactcctgacttcaagtgatctgcctgccttggcctcccaaagtgctgggattacaggcgtgagccaccgcacccggtccccatttcgtcttttcatatctccctttcctacccatcctgctagtgcacagagaggccatatccttttattctaggtcctctgccctttccctcgcctcagctgacagggcccttctcatagactccccacctcaattggcccctggatttgtccagaaaaagcactgaccatcttttcccctgaccacctcccaaagagcctcctcttgtctcaattagaaagcccacccaacctgtcctatttgcctcttagtttcttttttctctgaagccctcagagcccatagaactgcccccaacaccgagctgtggttcagaatcctgcctttccctctcccatggatgctcacagtatcaaactctccctgccctgggactttagaaactgctgcattatatccacagaatctgcttgatcaaactgcttctaagtctgggtcccttatcaatccacagggactctgaagagtctcccatctcctggggagagggtgatggaggaagagtcagaaggcccagtgtctagtccggttagagctccttcaggtcagcaaggcctacggcaggccaaggctccagctcagaaaatcaggaggcagctgggtgtgatggctcacacctgtaatcccagcactttgggaggctgaggcgggaggattgcttgagcccaggagtttgagaccagcctgggcaacatggtgaaacctcacctctacaaaaaatacaaaaattagccgggctgggcatggtggtgtgcgcctatagttccaactacttgagggggctgaggcgggaggatcacttgaaccccagaggtagaagctgtggtgagccgagattgcaccactgcactccaacctgggtgacaaagttagactctgtctgaaaagaaaagaaaagaaaagaaaaaatcaggagtcaggaacattccattgtggacctcttagctcagctctgctcctttcagagaaaaacctcagcagttactaggggagctttgctaatgtggaagtccctggttcactagagaaattgtgtcttttgtgcaaattgacccagccatcactaactcataaaccatctatagcaaatgtggtcattcattgtaaagactaagatctgactaaaatttttgtttgtttcttctctcttccatagggcggtccaggcggttctagcactggatttggaaactttgaggaaattgggccccttgacagtgatctcaaaccacggaaaaccacctgggtacagtgaggacagtcctgagctaaaccttgccccgtggcctctcagaggccctgcccaactctgggaggggccacaaatgtagcaatccctcgctgtccttttccttttcctgtgactactgaggccatgggcacttgtccgcaggcttcctctctggcctagcttctctcccatttctcaggacagcttatcttgcaccagtctgcctcgccttctccaaaacaacccctctctccagctgccttcaaaaacctactacagcagacacctgggaccctgtgttatgcacgctggccatctccgcggcctcagacaccatggttgcaccctccagccacagcccccagtccttttctctctctcctatcctcctacttgtatcttgacttcccctttcaatgtctctcttgctgcccttctcacacctccccctcattcttatcgtctcttccttccctcacccctctgtggtcaactcccatatccttctccctttacagccttgccaaacccagccttgggtcactcccactgtccacctgcttagcccttacgcccaggctgcccatgggcagaactgcacacccaccctggggctgctgcacagcgtgggccccactcagggcttgtggctgttcctctctctgtgctcccactctcccggctgcacctattgctatgaatgttctccactttcctcagtgctcctcctccagcctccctctcgcattagaagctaagctttctgctctttttttttttttttggaaatggaatgtccctccgtcaccaaggctagagtgcagtggcacgatctcagctcactgcaacctctgcctcctggattcaagcgattctcctgcctcagcctcccgagtagctgggattataggcatgcgccagcacgcccggctaatttttgtatttttaggagagacggggttttaccatgctggtcaggctggtcttaaactcttgacctcgtgatccacctgcctcagcttcccaaagtgctgggattacaggtgtgagccactgtgcccggccactttctggtctttctttgtttttttttttctgtttttttgtttttgagacagagtctcgctctttcgcccaggccagagtgcagtggcgctatctcggctcgctgcaagctccgcctcccgggttcacaccattctcctgcctcagcctcctgagtagctgggactacaggcgcccgccactgcgcctggctaattttttgtatttttagtagaggtgggatttcaccatgttagccaggatggtctcgatctcctgacctcgtgatcctcccacctcagcctcccaaagtgctgggattacaggcgtgagccaccgtgcgcggcctctggtctttcttaagtgcttcctactcttgcctcagggtctttgtacatgctgtcctcttggcctgggcctttcctgtgcttggttccaacagaagtctcacttccaggagtggttgtagagtcatcccctacctccactccccacccccattgtccccaagcctcctagaactaaaagggccatatgagtgaggaccatggtcccagtcctgatgctgccactgcctgtccgatcttgtgaccttaggcacattctgggctctttctgggctttaatttcctcatcagcaagggacatggctggactgtgtcattattcaggatcttttatatgtaaattttataactttcaacctctttggaaaaggtattagaataaattctgctcttgcagtgtacagagaagccaggacaatgtggaaatttgatgcatttccaagaaaactgatgtgtgtccagactttgagtgtcctctggcttcttcgagttagtgcatagactgtctctgcatgcttctttctgcgctagtttattacatttagtacatttgtattgtatgaaaagcaacagcccagattatttgatccccgtgtgtgttaatctttccttcctgcctctccctttttttttttttgcggcggcgggggcggttggcctttctttgtttttgtttttttttctatgttcctgtcccttatttttaaaaatctcttttagcaacagggatatcatcaccacgctggtatcctcacatgtgtgggttttgctgagctagtagaaaatgatccaaagatgattggtgaccaaatgtctgattgcaacatttcgttttcctccgtggtacatagctccaggctgccagtctcctatttgtggataatcccgtgggcactgggttcagttatgtgaatggtagtggtgcctatgccaaggacctggctatggtggcttcagacatgatggttctcctgaagaccttcttcagttgccacaaagaattccaggtaagcaaagactcaggaacagctaagtaaagggctggcaatatcaactctacatccatcagcataaacctgaactgcctccagagtttaatgcctagctgatttcagagaaaactttttaattcccaagattgggttgtggacttttgtttctgtcatctctaaagttgatatttaacttgaaagaatgaccttggagtgagcattctaatcagacgcaataatcagatatggagtggtgggggaggaagacaaagcagatttgttttttctggtcattacgtgcaatagaaatttgaaattaatttgtgtgactcaaaaagcaatcaaggtagttaattctgtgtaattccttttcttgctagacagttccattctacattttctcagagtcctatggaggaaaaatggcagctggcattggtctagagctttataaggtaatggaaaataactttgttgttatggttttggacagaaaatcaattatgttacttttatgtactcacgtgctattaaatatactttgaatagggccatgtacatgcagagtacgattaaatctgtagtaataaccataaaaagtttttaaaagaagaatgaagattgccctgctagatctggaacaagatataaagcatgagtgagtaaaagaatgtggtactaacatagcaatagacaaataggttaattgcaacaggatacagaatccagaaacacacacacatatatatgtatgtgtatcatatatttgtattttatataaatatatatgatcatatataaatataagataacgtttcaaatcattggggcatggatataatgtcgataaatgttatggagacaaatacctatcactttggaaaatagaaaacttgtattcctgccttgtataaaatattaattctggatggattaaaatctaaacataaaaataaaaataatggagacaaatacctatcactttggaaaatagaaaacttgtattcttgccttgtataaaatattaattctggatggattaaaatctaaacataaaaataaaaattaggacagaatgcagtggcccacgcctataatcccagcactttgggaagcccaggcaggaggactgcttgtgaccaggagttccagaccagcctgggcaacatagcgacaccctgtttctacaaaaaaaaaaaaaataataagctgggcacagtggctcctggctgtaatcccagctacctgggaggatgaggtgggaggatcgcttgagctcaaggagttgaagctgcagtgagctgtgatcatggcactgcactccagcctgggtgacagaacaagactgtgtctcaggaaaaaaatgaaaacaaaaaccaaaaccaatgtcctagtagaaaaatgtggacaagcaatttgtagaagaaatataaacagcctttagacataagaaaaatcttcagcttttattagtaagccaagtccatgagatttgtaaatatttaaaagactgataacacccagttttggtaagaagtcagggaaataagtgctgtcgtgcacttttgatgggaatacaaattaatttaaatttaaaaggacaatttgacaatgtcaattttttaaagatatgtgtcatttcacccaataattttgtcctatgggaatacttatacatatgtatatgtcagagaatgtttattatgccattgtttataatgtttataaactgaaaacagctggttggctgtcagtagaggattgcttaaataaagtaggtatatctttccaagatgaaaccctttgcagccagcataaagaatggatccaggcgggcgcggtggctcatgcctgtaatcccagcactttgggaggccgaggccggcagatcgcttgaggttaggagttggagagcagcctagccaacatggtgaaaccccatctctactaaaaatacaaaaattagctgggcatggtagtgcacgcctgtaatcccagctactagggaggctgaggcaggagaactgcttgaacccagggagcagaggttgcagtgagctgagattgcgcctctagtctgggtgacagagcgagactctttctcaaaaaaaaaaagaatggatcttagcactttgggaggctgaggtaggaggattgcttgagatcaggagttagagaccagcctggacaacatagtgagacccctgtctctacaagaaagaaaaaagaaagaatacagagagctatatatactgagtgtggaaagttctcctttgggtatttagttgtggaacgatatgagataactttgtttgtaagtcaaaaacacttccatatgtggagatagatttgtatgctgtgacggcaaacaaaagggttagaaggatacatgacacacttaactgcagtcagttggtgagtgtgagggcacaaatgagacaaagtaaaagactttcacatttccttctatctcctatgtttgaatatcagtgagcttaaataagggttttttttaagatttattaatttaaaaaacttatagaaacagcatatgtacattatagaatattggaaactgtaacaagcataaattaaaaatgaaaacttcaccttcccacctgatggagatcactatagttagcatctgggtatatagctttctaaatatttttgtgcacatttatatagaattgtttagctgaatgagatcatattatacatactggtttcagcctgctttcttcaatcagtagttctcaactttctatttctgtaaattttcatctcaaatattcagactttttctttttgagacaggatcttgctgtgttgcccagactagaggctggagtacagtagcatgatcatggctcactccagcctctgcctcctgggctcaagtatcctcctgcctcagcctcccgagtaactgggactacagacgagcactaccgtgcctggctaatttttgtatttttttgtagagatggggttttgccatgctgcccaggctagcctcgacctcctggggtcaagtgatcctctgacctcagcatcctgggtatctgggactataaggcacataccaccatgtcccactgattttttaactttttgtagagatgggggtctcactacattgcctaggctggtcttgtattcctaggctcaagcgatcctcctgcctaagcttcccaaagtgttgggattactgcgtgagccactgcacctggcctgaggacgtttcttgtttcctctttcaggccattcagcgagggaccatcaagtgcaactttgcgggggttgccttgggtgattcctggatctcccctgttggtaagtgtggcattttcaggcattttttcactccccttttgcccatcctttcctgggactttgggctgtgttgtccagatcaaagagctaagcaggagaatgttctgggcccttagagaaagtgtttgctacatccaagaaatatagagacagagtgcctaccatggaccactaagggctgaactgagttttcttaatttaattatcacaacaaaaggatcaaattttacaattggaggcattctgaagactcagagaggtcaagaaatgtgctatctgccacgtaggatgagtggcctagtcaggattcaaatccaggtctgtgctgctcagtacaaaggcaaatctgttttgtcatcctgccccctctacttccctgatgctgacataagtgtttggggtaaaattcccgtctgttacgcatattgatggcaagacaaggttatcgtctggtcttgcaactcagaagtgtgcagttttgtaattgagcatccgtgttgcgagcataaataagagttgtttatgttgcagacacccagggtgtggccccagacatctgaaacaatcatcctggtggcgttcactctaacacagggtttctcagcactgttgacattgtgggtcatatagttctttttgtgggaggctgtcctgtgcattgtaggatattatcagcagcatccttggcctctactcaggagatgctagtagcaccgctccagtgtgacaaccagaaatgtctccctggggaacaaaaccatccctgattgagaaccattgttctaacctaacaaaacgtgatttccccaggcaaaaccaaactatcgagttagaaatcagaagagaggctgcctaggggcaaaggagggaaataagcaggaaaggtacatgagggaaatatatcttgattgcagggggtggttacacgggcatatgcattcatcaaaactcttctgaaggtacacttgtgatttgtgattatggctcagttttttaaaaataatcatttataaaaggtaatatttacccctaaaagatagggatttgcttgttacagagccatattcccaataaccattacgacttggaatagtatttcttgccctcatgtttgccatctgcagggtaggactgaagtagcataaaactgagtcagcatgaagaggagggctgctattcgtttatctgtctttccttcctggatggatctcgtaggacatcataaaactgcagaagcttagagaagcatgagagtttcttgtcagatactgctcttttgttcatgttgatggcaagacaaagtctccatcaggtcttgcaacccagaggtgtgctgtttcataactgagcatcctcactgggaacacagataagagttgtttatgactcaaaattatgatgctggccctctcacttcctcatggggtctcctcagtttcacagtagcactaagtactttacatgtgctaacttcatgtaatccttacaacaactccatgggatggatgctatcattatcctaattttgtaaatgatgaaactgagacttagagaggttaagcaactttcttagagtcacctagctaaatggtagaactgggattcaaatccaggcagcaggtactggaatccaagcaacctaaccaccttgctacattgtctctccaagatcagtacgtttcgcttcctggctttgcaagtgttattcattgtgtttggaatctacctttttctccttgccgtgacccactttaccttatgaatctgtttgtctggatcgtaatccatccttccagatccactttaagtattgcccctctatcccagaaacattggtttttgagggagaagtattgttaatttccatgaacaattgttaattgcttgctaggtagtagatactgttctaggtgctaggaaaagatacacagataagctcctgatcttcaagaaggtcttgatctgcactgtcactaagcccatgtgaccatgtcagtatggtaaccacttgccacatgtgactatataaatttaattataatttttaaatacaatttcattttttcaggggcactctctacacccaagtgctccatagacacatgtggctattagctagcattttggactgcacagatacagaacacttccattactgtagaaagttctattgaacaatgcaggcctacttcaaagattggtaaacaagggcccatgagtcaagtctgccctgccgcctgctctggtaaataagtttttgttgtttgtttgtttttgtttgtttgttttgagatggagttttgctcttgttgcccagactggagtgcagtggcacgatctcggctcactgcaacctccgcctcccaggtttaagcaattctcctgtctcagcctcctgaatagctgggattacaggtgcccaccactacgcctggctaatgtttttggtatttttagtagagatggggtttcaccatgttggccaggctggtctccaactcctgacctcaggtgatctgcccacctcggcctcccaaagtgctgggattacaggcgtgagccaccgcacccagccggtaaaagttaatttactgtctatggctgtttggaggctgtaagaacagagtggagtagttcaaccgagataggctggcctaccaggccaaaattatttactatctgtccctttacagaaagtttaccagtctctggcccagatcaaacaggaagtgggatgcattggagaactgcagccaatcctgtgttttaagaaactaagaaacaagtttgaaggttaagcccgggaggtgattaacagctaggccacggaagtcctggtgtgcttgcatttctcagagagtactctaaaagaataccagtccaggccaggtgtagtggctcacatctgtaatcctagcactttgggagaccaaagcgagcagattgcttgagcccaaaagttcgagaccagactgggcaacatggacttagttcctgcagaactaagactacttgaaacctactttgagacactttgccttaaggagccattgaatacttttaagctaaggagagacatactcaaatgtgctttataagttgaggtccttgattctttgttggcgtgtctttcaatagcacttgtcttacctagtgatacagtatttaatagttgtgagcttgtctaaaccaaggtcaactactattctctttgaggacaggcattatgttactcacatttatatcttaagcttttgctgcctctagacccttagtaaattctcaatatgtttgtgggatgggaataagccaattggcaatatagccatttgcactgttgcaaactcattagtcatcttccttatttagctccttggcagaagctaatatctccaaactggaggagcaaataagatgtagagcagaaatgtgagggtggggaaatattttaagctgtcaaaaggcctagaggtccacagataagagcctccacctgcatacctacagcctgcctgtggggatgctgtcatcggcaatgactcacttgctggaccagtatcaggccaaattaatgtgccattagtcttaagagtcaacagaaaggcccccacacccttatcccaccttccagacactgagacatcagcccgcctcctgcatgggtacaggtgaattgaggagccttccaatccaaagccaccgggtttcttgcttctgtctctttcttctttagagagaagacagtaggtttgtctttggaaagacagaggtatgacatacttgatttgtacatatgtgatttcctttagattcggtgctctcctggggaccttacctgtacagcatggtaagtagatacacatctgcaccctctgggcaaacagcccagcagatctcttctggctgtgaccccaggaaaagagatgctggatgagtttgcctatgtggttgacactgctttttagggactagtcatccacatagagttggagacccaaagcaagagctcgcctcagggacaaattgaaagaaaatcagcacacatcacttttttccagatataagaaacacatttttccaatgccctaaatttttattacaaaaattttcaaatatgcagaaatgttgaaagatcacggtgaatacctacttaggttcagttaacaatttgctgtgtttcatccaataaacatgtggcttgtaacaatacactttgatatgtgagctcccgttctccttccttcccctctttctcctacccctccctaactgcagcaataccagattgacgttcccaagtaaagtgggtctttttgctcttggtttgcattccagtctcttctcgaagacaaaggtctggcagaggtgtctaaggttgcagagcaagtactgaatgccgtaaataaggggctctacagagaggccacagagctgtgggggaaagcagaaatgatcattgaacaggtaaaaaggggaaacactcagaggcgagcctgcttggctttttctggtgggtacagggcccatggttggtgttgtcaaacttggagtctacactgaggctccccacatatctgcaaatgattgcatgctggataataaatctcttgggtctaagcagtgatgtagtggctccttacagagtcagaaagccacccaggcctgcaagacttgcttgtccttcactaaatgtatggattctattaaaaaaaaaaaaaaaaaagactgtcttgcagaggtgagtgtgtggagaaaacacattcccttattgggacccttgccaagcaacattctgactccagagagccagaaggaaagaatgcgtaggctaaggacttgggagtgtaggcccctctgcagctctgttctccctgtaaattaacacctaggcccttggttttttccctgcagggcctgatcactgctcatatgagatgctcaccactccagggagagtgggctgacacagctggtttctgagacttcagagctgcatttctttctttattttattttttactttttcttttttcctctatttatttatttatttatttatttttgagacactcgcccaggctggagtgcaatggcacagtcttggctcactgcaacctctgcctcctgggctcaagtgattcccctgcctcagcctcccgagtagctgagataattggcacgcaccaccgcacccagctaatttttgtatttttagtagagaaggggtttcaccgtgttgcccaggctggtcttgaactcctgaccttaggtgatccacccacctcagcctcccaaagtgctgggattataggcgtgagccaccgcgcctggcctctttttcctttctttcttttttatttttttttgagactaagtctggctctgtcacccacactgtagtgcagtggcccgatctcggctcactgcaacctctgcctcctgggttcaagtgattctcatgcctcagcctccagagtagttgggactacaggtgagcaccaccacgcccggctgatttttgtgttttcagtagagaggggtttcaccatgttgaccaggccggtctcgaactcctgggctcaagtgatccacccacctcagcctcccgaagtgctgggattacagacatgagccaccaggcccagccaaagctctatttctttctgatccaagcagatatacaaaattaaacctgtccttggataagataaagagccatgtgtccttctgtttggcagctttgatgataggaaaatgaaacaaacagccaaataaacttttatatttcagaacacagatggggtgaacttctataacatcttaactaaaagcactcccacgtctacaatggagtcgagtctagaattcacacagagccacctaggtgagtgaaccttgaagttattaaagtccctgcctcagcctccatgcaaaaagaaacctgtttattaaaaaaaaaaaaaactttattaacatataatttgcataccataaaattaactcactgtaagtggttttcagtatattcccagagttgtgcagtcatcactacaatccagttatggagcatttctgtcaccccaaggagatcccacgtgtctgcttgcagacagttctcattcccactcccagccacaggcaaccactcatctgccttctgtctctctagattttccttttctgaacattttatataaatacaatcgcacaatagttagtcttttgcactggcttctgtcacatagcatgatgtttttgaagtttagaaaccagcttccatacaccaaattacaacatcagttcaagactgaatttagtcatctttcagccaaccaagaagcatataaaggctgcaggataccctaggttccactttctagatgattctctttggccgttctggagaatcccaatggcccccaagtctatagaatgtataatcaatactattaggttggtgcaaaagtaactgtggtttttgacaggtttcaagaattattaactcacaactaatgaagcattatttcccttcccacccagttccctaccaaccccttattttgaaccaattttgacaaatctattttttccctttttttttttaagagataaggtttcactctgttgcccaggccagagtgccattgaatttgagaaattctgccattacttttaatggcaaaaaccgcagttacttgtgcaccaacctaataataaagcctctccactttcaatgtgtttctgacttccttcctcccgctgggggtgaatcaaggtgacgcttttccttttccagctgaatctgaaaccctccctcttgctgtgcagcatccccagcagcttggtaaagatgtcctcatggccaggcgtggtggctcacacctgtaatcccaccacttgggaggctgaggcgggtggatcatgaggacaagagatcgagaccatcctggccaacatggtgaaaccctgtctctactaaaaatacaaaaatgagctgggcatggtggcgggtgcctgtagttccagctactcgggaggctgaggcaggaaaatcgcttgaacccaggaggcggaggtttcagtgagccgagatcgtgccactgcactccagcctggagacagagagagattctgtctcaaaaaaaaaaaaaaaagatgtcctcttggccttacttccagccctttgactcactatctaccagtttggttttagtttgtctttgtcagcgccacgtgagacacctacaacgagatgccttaagccagctcatgaatggccccatcagaaagaagctcaaaattattcctgaggatcaatcctggggaggtacttatatgacctaattaagtgccgtttgtacagttatggggagaaaagaggtgcaaattcagagacctgaatttgtagggtgggttttgttgttggtgatgataggttataggtaaacaatattactatccacgttttgtaggtgagcaaatagatacagagacagtaaatgacttgtcagggctggatgcagtggctcacgcctataatcccaccactgtgggagactgagttgagaggattgcttgaggccacaattaagcaacatagtaaagccccatctctttaaaaaaatagaaaaattagctgggcatggtggcatgtggcatatagttctaactacttgggaggctgaggtgggaggattgcttgaacccaggagtttgagggtacagtgagctatgattatgccactgctctccagcctgggcagcagagagaaaccctgtttcttaaaaaggggaaaaaaaagacatcaaaattgattcaaaataaggagttggtagggagctgagtggggagggaaataatgtgtaattggttgtgagttaataattgttgaagcctggtatgggtacatcggagcattgtatgcttctcctttctatccatttgaaattttccataataaaaaattaagataaaaaagctacatcgaaggccacagttggttgcagatgagatttcgcgccaaaggtccttgcaggatgtcagagacacccaggtgctcgggcagattttgaccagctctctcttgctgacctccccaggcatcctgatgctggatatggccaggcattactgcgttctggtctcaaggccatggtgaggaaataatgaaatccttagagaccagggccaggtagaaatcttggttaagttcctactttagtcctatagggaggccttgagcaagcagagatctcaggtttctgaagggaaaatactccaaacctaagagggttttgtttcatgtgtgttcaagataccccaaggatatggggtcagtggtcctgcggctgctgctgggagcctacgatttgctgctgctgggagctttctcaggggacatgggccctcctctcccaacctgcagtcaccagaggtctcattccatccctggttttttcattactcctgagtgctgggagaattttagaaatgaagaaaaattagctcaaatgaaaagagctgggtgtggccgggtgtggtggctcacgcctgtaatcccagcattttgggatgccaaggtgggcggatcacctgaggtcgggagttcgagaccagcctgaccaacatggagaaaccctgtctctactaaaaatacaaaattagctgggtgaggtggcacatgcctgtaatcccagctacttgggaggctgaggtgggggaatcgcttgaacccgagaggcagagattgcggtgagccaagattgtgccattgcactccagcctgggcaataagagtgaaactctgtctaaaaaaaaaaaaaaaaaaaagagctgggcgtggtggtgtgcatctgtagtctcagctacttgggaggctgaggtgggaggatcgcttaagcctgggaggtagaggctgcagtgagctgagattgtgcccccgctctccagcctgggtgacagggtgagactctgtctcaaataagtaaataaataaataaaaattaaatttttttaaaagaagacttcttatctcccaaggtaatgaagaagaaaatgggatgttgcttgtcagatgcctccttggcagtgactagcaaataatggtggctgccactcttattgctgtcattcagtgttaggataatgctgatgggcaggagctagcaagagtactagctcctctcttgcctggggcttgttattcatttggctttcctgagggccagctctgaattggtttaggtttgatctggtttattataaggtaggcctacctgttcagaacttgaaacttggccctggtgttactcaaaaaaacaggaaaactgacattggcccaaagcacaatttattccctgagtgtaccagcctaatgagtatttcctgggcctctccctccctgtttccttggacagtagcctattccaggtgtcaattcctcattaaaaatggtgcctgctgtcatcacaagctctcaagagaatggaccacatgtgctatttatgtgtgccttacacctgaccagtcggcacaaatttctgggctggttcatccctgtttgtgaagcatctgtgcattcagtcgttgttcggtgctggagcccaagatgctctgggctgaaaggtacctcctgttttggcagattccaagctactccctctttctccttccccatgtgcaggccaggctaccaacgtctttgtgaacatggaggaggacttcatgaagccagtcattagcattgtggacgagttgctggaggcagggatcaacgtgacggtgtataatggacagctggatctcatcgtagataccatgggtaggaattgactctgagaggcacctagaggcagttttatgggttcaactggaagggaactggccttggacatgtcagtcttgcggtgggtgatgttgaaatgccaggtggaaggccatttcccattacatccgtctaccccgaccttgattattcaaagggtggggagctgcacgtggctgtgacccctcagaagcctgagcctacctgggtttgggggcccttaggtatgattaaagaaaagaacaccacctgtctctaccacaaaacttagacattttcctggttattgggcaaatgcgctgtttaattaagggagagcctcatttttgtgcgacatcacagtcgatgttgaccactgcagagtgaattaaaactaaaccctaatgactgtaaccctgaagacccaggggaaatggtctttgtggaatcctgactcctgccctatcacctaccacctgtttaatttgctcacttccaaattaaatagggcctggtggaggctcagagacaggttctctgaactggcagggtaattgaggcacaaggtctgacggatgtgacacgcctcgtgaaccagaaggattgaatatttttgtgatgggtaaacaagagacaccaaggacaatttggaaagctgctgcatttctcgatgaacatcccaggtgatccttatcactatctcgttcacgacatctctcagtcctcctcacaggcctgtctgcctccagaggtccccagttcccttcctaaagagcagatggcggtgagagatgcagaggcaaaatcagtcaggctttgcagctgttaggtttctcccagcagcctaggtttcactgggagtcagaaatgcagatgctcaggccctaccctgatcttctgaatcagaatttgcattttaacaagatcctgagtgagtttcatgcatattgcagtttgggaagcaccaacttttaggacctagacttttttcctattctatccagctgttaatgccaggcctttctctttgtccttctcaccaggtcaggaggcctgggtgcggaaactgaagtggccagaactgcctaaattcagtcagctgaagtggaaggccctgtacagtgaccctaaatctttggaaacatctgcttttgtcaagtcctacaagaaccttgctttctactggattctgaaagctggtcatatggtaagaaagagcttttgttccagacttaaaaatcatcctgagagggaagccacaggcggttattatgcctctgtccactgcccaggtgggtcttgtaggaagtacgagggcccgagggccaggtacagtggctcatgcctgtaatctcagcactttgggagaccaaggcaggtggattgctggagcccaggagtttgagaccagcctgggccacatggagaaaccttgtctctacaaaaaatatgaaaattaggccaggcacagaggctcatgcctgcaatcccagcactttgggaggctgagacgggtggatcgcttgagctcaagagttcaagaccagccttcgcaacgtggcgaaaccctgtctctacaaaaatttaccaggtgtggtagcacatgtctgtaatcccagctacttgggaggctgaagcacgagaatcacttgaacccgggaggtggaggctgcagtgagccgagatagcaccactgcactccagcctgggcaacagagtgagactctgtctcaaaaaagaacaaaaatcaaccgggcacggtggcgcatgcctgtggtctcagctgctcaggaggctgagtgaggtgggcagattgattgagcctgaaagttagaagctatagtgagccaagatcatgccactgcactccagcctgggtgacagagcgagaccctgtctcaaaaaaaaaaaaaaaaagaaaaattaaaaaagaaatacttagggcttgggagtgttttgagtttcctaacaaaattccgctattagcactagagactgcgagcacaagggtgagtggtgcccagtccctgtcctcaaggagcttgtggtctagagacagacaggcaaggagactgtcaacagctggcttggcccagggaagggtgccctgcccaggcatgcagatctggaagattgtgccccacgtgatgcgtaggagtgatttaaggaaagaggaggaggtggggagcatggagagcagtgaatacaaggtccacaggagcctcagacagcgaggacttggaatggacactggagggaggtggctgcagagggggaattttcataccactctaaggagttcagacagtagggcaccaagcaggggttttaagcaaaggagtgaaattaacagatttgtccaagaaataccattctagcagtagagggcatggggcaagcctggggccaaagaccaatcaatgaggctgtcaggtaaatccagaaaggaggaaagtagatggatttggtgaagtgtaaagaagggaaaattggcaggacttggtaatcatttggggtagaaaagaactgaagggtggcttgcaggtttctgctccagcattgtggtttgcgatggagggaatttgcacaagctgagtttgaattgcctatagaacagaaggcagaagaagagcctacaaatgagactgagaaaggagcagccagataagtgagaagggagaccagggatgcgtggcatccccaaagcagggaggggcccgcagtgctaagtgagaactcaggggaagggctgaaacgtgagtgatgatgtgcttacaccgatgtccttggcacctgcgttggtgagatattttggtgaggtggcaagctcagaagccagattggaaagactggagaaaatgaatgagtagtgaggagaagagacagtagcttcctttaagaagccagagaaagcagcccactctcaaaagacacttaatctaggctgggtatggtggctgacacctgtaatcccagcattttgggaggcgaaggcaggtggatcacctgaggtcaggagtatgagaccagcttggctaacatggagaaaccctatctttactaaaaatacaaaaattagctgggcatgatggtgggcacctgtaatcccagctactcaggaggctgaggcaggagaatcgcttgaacctgggaggcagaggttgcagtgagccaagatagtgccattgcatccagctggcgagatagcgccactgcactccagcctgggcaacagagtgagactctgtctcaaaaaagaacaaaaatcaactgggcgcggtggcgcctgcctgtggtctcagctgctctggaggctgagtgaggtgggaggattgattgagcctgaaagcttgggtgacagagtgagactctgtctcaaaaagtaaatcaataaataaacaaatagacttaatctaaagggagaacaaacaaggcagcagggcacagagggagagggcattatttatggctctcaggatctgagtaccttcaatattgactaaaagaaagaaaattagaacgtcttagagcaagcactgttacaggttgagtaccccttatctgagatgtttggaaccagaaatgtttcagatttttaattttttttttattttggaatatttgcatatccataatgagatatcttggggatgggacccaagtctaggcaatggaattcatttatgtttcatatacaccttatacacatagaccgaaggtactttcgtacaatattttaaataattttgtgcatgaagcaaagtttgtgtgcactgagttattagagagcaaagggtggctatttcagccacccatggctcttcaaccaatctgtggttgttaggcatcatatcatttctgactccaaatttatatgctgccgataagcaatctttttcttgcatgtagtcacacataagtacttcacagtaagaaatacaacataccattaatacagtggaaaagttgtgtgttcagagtaactgagcagcacagtagcatgaccagaatacctgtgtcagctgctagacaacagcaacagcaagcaacagcagctttcggtctctacctacaatgctgtgttttgattaaaaggttactgtactgtaacccccttggggatgcagaaataaactgtgtgttgtgcgcctgcattttgaatgcagccgcccatggggcaggtgtgaaatgttccacttgtggcctcatggtggcactcaaaaaggctggaattgtggagcattttggattttccaatgagggatgctcagcctgccctagagagaagtccctgacgaggctggtaggaaggcatggaacaagccaaccacgcgctctgtatactagagttcaggcccatttcctgttggtttgtcacatatagaacaacagatcagttggggacaggcttaaaatagcccttggagactgttgttaagtcgtccccaaaccacttcccctttcattgattaaatgacattttaggataacccaccttgcctgtgcctcctggggactcttggcagaagagtcaaggatgggtgtgccatagagaatcatggagccagggaattacataacggggagaccatatactccaaccccttctgtgtagggagaaactgaggcctctgcccttcccccttttgatgctgtgtgggaaggaaattttaaaggacttattctaaaaatctgagggaaaacaaaagaaagttgaataactgcgaaaatcggatgccacccaaagggccctgtttgtttttattatttgcggctctctgctgtgagctcccttctcagccatttctctattctcaatccgggatcccttctagacagatgcctttaaaatgtttagaatcttccttcttccttgaacaggctaggtctagtatcattagcatgacccttaccaagaaatcaacagatcagctccaaatggagtagaaggttcttgtcttaaatgctgacttctccaggtccctgccacccagcccagtcagggcccagaagagctttcatccagtgcaggagtcattttcaggaaggaccctctctcagggatgtgcccaggtgtctgcacaggttgctgtcacagagctggctcccttttgggagcaaggtttcaggatgttgcctctgaccccagccccaggaatagcaccaggagcactaactcagatgttgtttttttctaggttccttctgaccaaggggacatggctctgaagatgatgagactggtgactcagcaagaataggatggatggggctggagatgagctggtttggccttggggcacagagctgagctgaggccgctgaagctgtaggaagcgccattcttccctgtatctaactggggctgtgatcaagaaggttctgaccagcttctgcagaggataaaatcattgtctctggaggcaatttggaaattatttctgcttcttaaaaaaacctaagattttttaaaaaattgatttgttttgatcaaaataaaggatgataatagatattattttttcttatgacagaagcaaatgatgtgatttatagaaaaactgggaaatacaggtacccaaagagtaaatcaacatctgtatacccccttcccaggggtaagcactgttaccaatttagcatatgtccttgcagaatttttttttctatatatacatatatattttttaccaaaatgaatcattactctatgttgttttactatttgtttgacatatcagtatatctgaaacaccttttcatgtcaataaatgttcttctctaacatttttaa

SEQ ID NO: 230 - DNA, 104669 bp, Homo sapiens
  source 1..104669: mol_type = genomic DNA; note = NC_000021.9:c15065903-14961235 NRIP1 [organism=Homo sapiens] [GeneID=8204] [chromosome=21]
gctgaagaagtagcagccctgctccttttcccttgtcttgttgggtcagatccttcccggggatgatgcagattggctgacagactccgctggagacttcgcagtgacaaagcagccgaggattaaccctgctcctgggtcctacgtctgtccagggagctgagcggggcgctcctcaggtctccttcctagttttcctcccagagtcgctccacacgagtgctgggcgcctactacgtgctgggcgtggggtcaaagtgacccagagttcgcgcccgtgccccccaacattaaagcaggacacacagattacaaggagatagaaattgggggtgggtgggtgaaagggggcccagagagcgcgtgttgtggggtgaaggggaggaggtagacgcttaaggcaggcggggaccctggagcgtctggggcgccccggcccccaggctgtgcccaaacgggagcattcggcctgggtcccaagagcgctttccccggtccccaggaggagctgtccaggcgcctgcagcggtcgcgggcggctggacagagctgggagcccgggggacggcccgggcgcgccgtgcagcccctctctcggggacgcggtcctctcgctgcctccgggtcttgcagccccgtctgggacacccggagagcaggcgagaaggaaatccacgaaacagagggggttccgcagctcctgtgagccgcccggatccgcgcggcttcctcctgaccgggtgacaatgggagggagggggagaaaagggttaagaaacttggctgaagagctgaatggcgtggggcggcgaggggagggactgggccgcggcggactcggcggcggagggaggagcgcggctgcgggcgggcggtgagcgaggcgctcaaagtcagcctcgcagacattgcagcagagccccgaactcgggaggcggcggcggaggaggcggcggcgaggcgcagggacgacccggccccacgcccgcccgccacccgcgcgcgcccgtccgcccgtggcctcgcgtccgccgctgcgccgtgagcgccgctggtcggagggaagagctcgccggggcgccgggccaggacggggcggcaggcgccttcgcggaccgagcctgacggagccggaggctgggagccgcggcggcctggggtgagtgacggccgcggccagggcgccaggagtagcggccgccggcgccgccggaaacggcccgggagcgcggcccgcgtcggctctcgcttggctggcagggccgcgggggcgtcggggcggcggggagggcgcgtttccggggaaatcctgcctctgctgcctggttcgagtctccgggttctcgcggggggccggggcggcgggccggcaagttgtggagtggccccgggtcggcccgcccgtccgtgccagttctgggcaagggggcggccgtcgcgtggcccctgagcggggccggactcggggggccgggtcggggttgcccccgctcgcttgccctctcggtcccgaaccccgggcaccgctcgcctcgccgctctccgtcctgctgtccagccggatcctgggcggcgcctttcgcctgggtgcctccctgctccttgctcgctggatacccggctgggaaagtgaataggaaaagggacagctcgcccggcccccacccgaccccgggccgctctgcccgcactcgcggtcccctcccgatggcgaggctcacggacccgaggcctcagccatcattttaccaggagccaggggccggcccccatttagggtgagcccggtggaagtccgggaggctgccttttctcccttcttctgtgtccaccttattacgattgaatattgttttatgaaggtttccgtggatgtattctgcagaccctcccatcccttccaaagtagtttcccaattttgatcaggagttggtgttcagtcagaaggaacaaaggaaccaactgtgtcttagaggcggacaggctgggagtctgtgacacatgttgatctctgaagcattccaggagtttctaccttttatcacgtcaataattggctgctgaaggtagtaaaagaagtacggaatgataagcacttttgcgttttaaaaatattttttaatggcacattttactttggggaaaaaagacgttcttaggcacaaggatttttaaaaacccagttggtggaactgagttggagtttgtttctggtattgtaaatgattacatgtgggattgtgaaggaaattgtgtccttagaggaagagaagccatctgtaggtgtccatagtaaaaatggttgtcgggttatatgtgatgaatgctctttctgtttcttgggggaatttgtgaagcaaggggcttcggtaattcattctttaaagttatgaattgcattgaacctgcttattagtgaatcataggtttagtaagtgggtggcattattcagtgtttaatcatcagttttccacctttgttgaagagacagtgaaataatagactttttaaacaaatggtgtttcatctgcctggcccctaagtgtcggttgccgcctggagtatgttgaagtgtttttcaccttccaagtaagtgagttgctctggttttgcccggcagttcggtaacgtcgatagggtttatttggttcagggagcactggcttcatcacctacagtaactttttttctgcctgggcatagttcctagagacaaagaaggagaatcaattagtggagcggctactgccctgcaggttgtaggattggttgttctagtctgtttcatactctggtggagaaagacctctttccaaacttacctttaaaagtgccctaggagtgtgagtaaaatatacatcagaacataacagaaaaaaaaaaggactgttcgttgttgattttattcaaatgagttagttgaaaaaccaggtttaatgcctgtgggaagttagttgaaaaccaggtttaatgcctcttttacatgcatttctaaactctgcagaacttggattttgctaattttaacaccctaaaatattgttaactttgcactaaagaagtgtgtgaagagactaaaggcttttctgactcttgcagttataagtgcaaaacatcatgataaaaaataacctataccaccacctagagtctgtttgttagtttattgctcatgaagtttgcttaaattgacatgtctgttacagttctgatatagtcgaaaatgattaagaagtactagctttcaaaagcccgtccaagagaacaattatttaagtaataaatagcaagtgccactttaaattatccgtgccacctttagaattgaaaattatgacatatcaagttgagtgggctattctccaaaagatgttaattcagaagattttaaaacggagttttcagtttgtgcgccaaggcagttctgattgcttaaagacttctgcgttgttatcagagattcaagaaatcttcccaatcagatgccattagaactttttgaagtccagatgaaacaaaagcaaaaatacaggagagcattacaactacagaaattctggaaattcagaagttaagagagaacgcagcccatgacagagttgtgattcagagatatgaagagtaaaatcaatgtgaattaaagtgataatctgttttgctggtagtttatatgtggtaaagcagtctattaaatgagagaccttagggaggcagctttgttgccatgtggcttatcacattgtccatggaggaagtaatgttcctcctttaagtggtgtagcctgagagaaagatggcctccaagatctttaattaaataccagttgaacagaaagaactagagcactgtattaattctgtcaaacatcactattttagaacattgaggacaactaaaaatgaattaacgcatatctgaaagcagagtttgatagaaggtgacagatgaggcaaaatatgccaatctaatggaacaaataagataaggagatatgccatccttgactctagaaagatcagagggaagaagattattgttaattgcacagattctattgcagaccaatgctagaagacaatgacatagaagtaattttaaatcagagtggcttaggatatatgaggttaaaggaatttggcttttaattttaaaacgtaaagaatgtaagaaactcaaaagctcatgttctaactgttgtttgggaaaagcagtaatagtttggtgtatcaggttaaaagataattttgctcagaatgagtttaaaataccgaatttttgtcaaggaaaacattattcactttaaattgtgctagggtcagttttgcttttcgcatttgagattgcttgatacaattagtttttaatgtaggttagtaagaggaaatggtagtcccttccctaccatttccctccctcccttgctctcttccccttttctaaaataaacactgtctagatctttggatattttcttccatgaaaaactgccttagttgcagcgttccttcttggctgtgggtggggagaagtttcttcactcttgtacttttcccttctgccccttcaggtgattgatacacaatcagagtgggttttgttctgtgtgtttgtttaataacgatttactgttacacggatgaagactgggaaaaagcatttgccgttctagcaaagtcctgtatacccatgtcttccaactggagaaatattttcattaaaataatcttgactactgttgaaaagtcaaagaaaattttcaacaagatatgctagggtcttgcaggatatgagtttgaatctgtgaactaaaaaggttcaagttgcatttccttaagttgtagttttttcagggacttttgggggagggggaatgagcaggctcatcctgtagtatttagataacacaacaattagagaaatgtaacaccactatggccactaagacttgagaaggtaaaaaccaggagtgtcagatggtgaaacaggccattggaatggaactgaagattatgtcgagaggttggaatgaacaaaaagtaaatggaggagagagatctagtttctgtatcctgtttgcatctgatgctgaagcagagacatgaattgctgatggtaatggattctattctcttttaggaggccagcaatattatataaatagtggttgtttgagggagagaaacgacaagttccccttttgtgcatgttcacactttgttttgaatgtctctgagatatctttaaagtagaggatcaaaattgggtaccagcatggaatcaggagttatactttggaggaaaatgaattaatattagatcacattttctttaatcttttaagatctggaattttacaagggtcttcatcaacagggaaaaccgtgttctgagtgctaaagtttgggtggtgaactggataattcttttataggatctctgataaagataaacatgtaaataactgcagaaataatgctttatttaagcacattacctatgattcatggtagggggaaaatagagaccacagaaactcctgaagtcttatcagggtttctttgcaaactattatatggatgcccatctgttgttttttcttgaaatttagtgttcaggttgatggatactgaatgtataggattctgaaggttggagtttatttaaaacagaactttccttttgttttactacgagttatgaaatgcagttttaatttgttgcaataaatatagaaactgagatgagtaggaatttatactaacttttctcactgttatggtacatactctatatcatgaaccttgaaattcaaattgatccctacactatcttgcaaatattacaaatgaagaattacaaaagttgtggtattttagcttatcaaaatgcacccgaaacataaaatatttttctttaagttcttaaatcagaagaataggaaagagttgaaaataaatgtgatacattttatcattatattagtattttgttgaaattaataccttgaatcatgctatggataaacatttagcctagaactctaaaagtagtataatgtgaatcagatttaaagaattgagaaggctggcaattcaaaaatagaggaagaaaacactctttggggttatgaaaaaaaggatcctcttagtattaagatttcttaaaaagctatacacagttttaagatagattgttcttgaagataatggggcaaataattacctgctaaacaaattatgagtcctgtgattctttttttggttgaaataatttcaagaactccagcatatgttgcagttttggctagaaaggtgattgtgacatacatccattcatccattctccctctctccttccctccttccctcccttccttctttccactttcaatacatagggctggggtagcaaaaaaaaataataatagtaaacagttttgtaaaacttgataatagaattatctgacagggttaatagttgtgtttgaaattcagagctagtatggttcactctccccagaaaataaaattttaatttcttacacctcagggaataaaaactctaaattaaaacccatcttgcctctttaactttgtgtcacttagcaaaaatatctttaaggatggaaagaagagaccccatgtgtcttaaattccaagtcactgtgtgactaagctcggagttccaataaatattaaactagaattctgctgggaatttgagtcatccgcttaagctactcctgggaccaagacaactctggttgacctgatgttgatgtttattcagagctttggtggaaaggagcctctcacccttggacttctaattaacaaagtcattccttagtcacttgttaagtgatagagctactccttgttttcaggcctgtaatttgctaaaggattgagcacaacagagaaactaaggagtttggagcttctgctgtttagagtctgctttcattattttacttttactttcttatctagctatgtgagggtactatgtaaaagtctggtgatttgctttagatacttaagagaaaagcttagctgtagtcacatatagtgtctaagatggctttccttatagttacatgtttttaatagttgagtttgcctatactcttcataacatgtgcacatgttaaatatgttactgctttaaaaaagcatttcattagtaagatggggaatcgtttatgtacaatattgaaatgagagtagtagtataatggtgtgtttggtaactaacaggacacaatcaaaatttgagaattagaagttcagaatgaaaaaaggacttctctcttgaggaatctatctagaagttgagagatagcaagtgtttaacagagtgtaatgatttctgagaagcatgcttttaaagattttttttaaattcctgaatttatgagtttatattataataatctataatagagcaatagatttatacactggaaaagaaacaaattaagggaaggagagaatacacaatgacatggaggacatcaagaaaatatgtttggaaacatgtgaaactctccaaatgggaaataaatattcttgagagaaattaatcacagttgcagtttttctcctaaagggactgtttgcacaatgggttatgtaggctcaggtttgatttttgaaaaacatgttaaaaaatagtattcctgttattccacgtttatttttcgagtttaggttctgctactaaatcaagatgatacagataaaaggaaagcccttttatctcccccggcagcatctgttgaataagggggttatatttgatttctaaattctaaaattctgactgtacagcagtatatgccgttgttgacagtaaacagtaaagatttcaagcctgtggttttaaaagaagaagagatgattgggtagaaacttggaatattaagaagttgtttagttacttggctgttgccttttcctgttttgttgggagggggagcagggaaaggaagagtattgaactttttggggcaaccgttttgtgccagacattgtgctggaagctttacacacattttgtcttttaatccttccagttcccctgtgacatgtaggtatcattttctctagtttagagataaggaaacctagtctgaaaaatgcaagaatagttaacttgcctgtggtcacatggcaaatttcattgataatttgattttcttaaagaatatgccattgtttgaagaaaaaaccagttgccatctgacattcaggaagccgttaaaaaaccttgctcccaacctggtagccataaaactcatgcagcatttgcaagcctcatagcctggattctccaagaccaggctctctgggaaggcacattgttgccagtcgatgattctgcagcagcttatgctagttctcaaagcgctgatgtcctgctacctgcattgcgctggagggaaatgtagtcaccaagggctgccgcacaggctcttttccctccagtgctaactcttctgaagtgtatcacagaattactgcggtgttatttgaggcagtgaaagcaactatgtttctttatataattcattgaaatagcttgtcatggtcttaaactgagtgttcccaaggctagttatgtttgtccacttcaaggagcagttgtagcaaattcagaaccatagctcttcctggttgaaaagttacaactcttgactattaacagttcttaacatgattttttttttaattaccctatcttcactcacaacaattttgttaaagactatcctgtgctgataaactgctctctgaaatgcaaagaggaaattaacaatgtatttgtgaattggaaggaagtggaagcagagagatgaggagtagttgactttattttgagggtagactgtgtcaggagggagattgttgagtgggggagctttgtggcacatagtacatttttaagtacataccaggtacgttcttttattgttaaagccataagaaatggagttatgagcttctccacctccttttacttgcctcatttaaaatttatggaatttttgaacctaaaagattcaagctgagtggttccctatacactgaaaggtatagtcaaattgaaactatattggagacacaaagatgaataataagacgtgtaaacataatattttctagggtgctttggattttgagttgccaaatcatgttggaaaagcaagagatttgtataaaagctgcaaaggaaacatctgtgttttgtttagagaatacgttatattttggccaaataagaaaaaagagaaattgtcaaagtgaacaatatggggggaagaatgtcttcctaaagatcagaatgaacttatattatttccttaactgatccatgctttttaaaaaaaaatgaattaaaatacactgaatctatgtgaagccaaatataaggattgaaaacagtcttttttaaatttaccatctgattcctttccaatatctggatgtttgctattattgtggcaagacccattgttaactgtattgctaaaaatctacttttatctatcctggtaatacttgactgacctgagtcaaagtcacattttcttttttttttttttttaactttgaatttcttttgcttgggctttcacaaattgaagttatttcatagaatcgttagatttttcaggttggaagagaatttgataaaagctacggctgctctggatttaagcacacctatcttagaggcaccttgtcctccccccatttatcaaacaagttagtttttagatgcatcttttgtatggaagagcacacagttagtgtagactataaataaaataatgataaaatgctaccatttagtgcttatgtgccattttctttccttttgggtttccttctttatttctgttttgtctttactctgttttcctttttatttcttaatatctcattcatctttttttttaattgccaggggatccatgtgatacaatggggtcaataattacttatcttcctgtagtttttgttattgctgttaagttaaaatgcccaaaacagttactatctgcattttacggaggaagaaattgagtccttaagaatttaaagacgttttgaaagtcattcagctagcagttgggtagacctaggatggtcagtcaaatcttgatttatttcacacttttttgtttatttttgtcaaagcagtctcagaaagaggggtttgtgtaccaggtgttaaggaatagttaataacctttggtgatggatcccgcagtaaaatccaagctaaccccacaaagggatctataataataagaactgggtcttgagacatgaaacgagaattggctggctgcatcacttttgttctagtaccttattttcttctcatggtcttcataaaagtcttaggatttgttgaatattctagtacttgaaatgtaatttccaggctgagaatttaaaaaaagaatagtacagttatgtacatgttcatgcagtggcattgttttacatgttacgtacatttggaattttatttaaaaagaagtagggagacttgctatttatttgcagacaaagagagccagatacctttagttgaccagaacactcacaggccagctctactttttactgatgagtagtattccaacaccattaatgtaggtggttgggtctgttggttcaactggaaacatatctcaaagtttatggaccccattcctctattctcttgagaaaggtaacaaataagatgagggggcactgtgtggaccagtggtgataatgtgccatgaaccaagtgcacgttggtctacacccctagaaaagagagcaagagagaagaaacctatgtgtagaccttttcatggaccacacactggccacgttcctgatgttggtgaaacaaattggaaaggaatattctccctcatgggacagtgggcaagggagtttgtaggcttacttctgtccccaagcctctaacaagatcagattttctttcacagttttgtgtacgccctgattgtaaaagttaaacttgtgttatagctgttttccttggtagaactccatgaataggagcttattcatcagtgtactgttggtcctgtaagtgtctggcacacagaaggatgtctataagcatttgttaaattgaactgtaccagtcccaaccactggcaaaatttggcacagcagtagaacctttatgtatttatgcatagcagttgttaattattatgtgtaacttatgaataatggaagctcttccacgttttttctttagtctgtttaaattaggacttttaaaaggaacaatattttttccttaaaatgtatcttcttctttccaggcatactaattatgagggaaaaagtgaaactgactgttattgacattataattaattggtacttgaaataatttgttttgtaatattacatttcttcagtaatacgcaaattatattagaaaacgtttagcaaaatctttgggggcaacattttttttgtaaggaaatgaatacaaatatttctggagcctactaggcagtttccttagcatcacttcctgtagtcaaagggacccgccagctgggcacacttaactgccttggatttgacggcttggtaaggtggaaatcttaacatttcacatccagagttcattttggtgtgcagtaaccttaaaagttaagagggtatcaagaacagttgatgattcagaacttggtaagttatgggattaagtagtatatgaagcccatctatgttttaaaaattaggatttgctcttcactgaaggtgaatttcctgactcttttctaagagtcatattcaactacattaataactgctggtaagagacagaaaataaaattattttgaaatggagctcagagatttctagacgagaaatttattttaaaatgctaatagaaaataaattatatggatatatatttataacactgatttttaacagatgctcttaaaataactttaacctagtttcttgctttgtgaagacaaagttgtttgttgtttcttttttgtttaacaaaggtaacttcatgagtatttgacagtatatttcttttggctcatatttctgtgtattcacctgcttgtaaatcatagcaaaaaggaacaagctaatggactaatatatgaagtaaaagggcagaaaaatgagcacatttactatttatgcactgtgttctactgtgtgctttcctccagtgcttacttatcctgaattcctgaacaattttttccctcattgttcattagtgtcagtcggtatgttatagaaatgtgtgaatttctataaattagttgtgagtgtgaatttcccactgttggattcctcagcagacacccaaacttaatttttatttcatgaactaaaagttgtagctaaggcatgacatctgatcaaaattaacactattatcctttgcaatgaaaagggtgaataaaactaaagttcctggtagttgcccctgatacaagtgtttgcttagctttgaccatacatctatctatttattttacattttacacatccatgggtattcctcccgataatgccaaggaatgctttcctttgcaggcatcattctaacaacacaaacacattcactgtgaattttaaactctcgttctcttttttcctcctttaataaattatctcattgagattattcattgttttggcagtactctaaacgatcttgcttttgcaaaatcattgtatattctgtttaatggcatgttactttaaaactgtaaagtttagggttgctaaaggcaaaagctgacaatatttgttaatattgagaataggtaaaaatgggcctttgggcagtcaacaaaagtaaaattaaaatctgactttaaatcttttgaaaatctaaaattaatatggatttctttataccaatcagaaattcaaattttgttttatgttactgatctttaagttgtttatgtgtcacagtgagagtggtaggaaccttttttttaattgtatgaagtaaatggaaggaaaaataacagtatacatcactgtggtaaaactatctttaatgatagcatgttactttggactacgttttgttttattttacagtgaattaggaagtgtttttcattgtgttttttggaattctggtaaatgtgagcagcaattcatatgcatataggtgtaaaaaagacgtatttgaaaagatatgctgcgtgaatttgtccagtgaggataagtagcaagttgtaattaccttctgtagtttaagtcattggctgtattgaatacttcagtgaagtatcgcgggggaaaactgtggttgtacatactaccttgtgagtgttgcaggatttagtagttctcaatgaccattgttacttttaaaaaggaaaaaaagtagtgaggggataggataggaagttttgatgtgtgggaggggaaaggaatcattacttctcagctgctgaagtcgcagtttattttgttttaggcctctttgcatagcatattctagaggatggcgaaggataatacttcggggtgaaaatgttagtatccttaacatacttccgggtggtttaactattaatcagaagcaccatggagattaaagaattggagctagggattagataggttttagtgaggctttgccacggaaaagctatgaaatgggtgagtcattcaacatctccttgcttcagtatcagcgttacttcgaaagtgaggttttactttcaaatgtattgagtatcagggtgaatagaacttagggctgagaggatgtcccttatgattttttgagcttggcatttaatattttacagcaaagtttttagcttaacataattgaacttgtactagatagggttaataggctagaacaaaaggtcaaagcataaggcattaggcttaattaagggagagcaggagtggcaggagtgtgtgacagttaaatgggtttcccacagactaatgtcggttacagtgcaaccatgcctcaacttaagtgggttattttgtgcaaagggcagcagtgattagcagtttgacatgccagacacttctggccaatcccatctgttttagaggttaaaaaagcacacctttatgagctgatggattgatttgtgtgcccgtctggtaaagattagaagtccaaggccaatgcagtaaatgtcagttatagagtattatactttcttggttggctcattgttttaaccgtcaactgttttataatgggggataagtgctgtttatggtgttgaatgcaagataggtgggggaacaggtgagggaggaagaaaaatatttcctagatggacttgtgaatcaaaatattctgtagcaggtgttcacattttaaatggagtgtttttgacctgttccttacagtttcagtcacattgttcttttctgagtgttatctgagcaacactgccagtccaggatttaattttgcatacagaattggtaggtttgtttatttaggtacctctttttaaaggtgtaataattttttattgaccacctgaacaagggaaaataaaatgaaaatgacacacacacgcgcacacacacacagagttctgtgttcttttatgtggtcagtcaggtgcatgtgaaaaggagacccaggaggggctcaggaaaacaaagtttattatactcatgagttctcggaggcacagcatgccattcagggccacatgagaaagccccagtgttggtctaggggccaaaggggcaggagctagaagagagaccgggctgcagccgtttctggagtatctgtgggaaaggcaaggcagggcgggtaaccaagtttaggattcgctagtttgcattagctgtaggtaaatgctactgctactactactaataagctataggtgtgtaataatagtagctttgaataagttataggtatacaggctctaaactgtaagagtgatccctagtttgcctggtagataccaggcaggggaatattgcctcctgggtgtatgggtcaggtagaggaggtatcgctgtggattgtttagtttgcatgtgaaaggcacgctgagtcctttgccttctctaagcgttggctggcccctagaggggcaatctcttcccagccagaaaggagtcaaaaccatcataatatacagaaaataagaaacataaacaatacacacatatgtacttgctttaagggtaggatttactgtggtcacgtgagtttgaagtgtgtttgaacttagactctaacctatttctttcttcattgaaagttgttaagtgcgatgccattagtatagttcattttcagttctggattgtagctcatttaaagatacacaaatactacgttttggttatagaaattggctccaacatattctgaaattcaaggaaagggaagatcccaatattatgtgtatgaaatcttcagacattgtcctcataatcagtgaacttagtaacataaagcattgattgattcttttgggataggcagagagagaatgtttgagaaaaacaaaagttatcttaacagattatattcttcctgaggtttgagtttaagtagaaatgtagccaagaacattggaaacacattggaaggttctgattggtctcaatagcttatccttgtcaaagaataggaaccaaatattgcctgttacctagttacacacatatatttcatgtctgactctgaattgtttcttatagaaagaaaattaaaataccaagatgtggtcactgaaagttatatgtagataacaataggaattagtattttattatgtatatgtatgcatttattttaaaactaagctaatccaaagtgaattggcttaacttataagaagacattgagaaattttatttctcatttacaaaggacaaagtgacatcatgtattgaagttttttaggaatatattaattaaatatatgtccatctgtgtgttctttgtggagtagcatctcttgaaatgatttggatctaatatagatttacgtaagaaaagttttgcccttctctatagggagagaaaatgaagaagcatgaattttataatatcatagcttttttttcattaaatcatttgtaagttgcaaaagattggcttgagtagtgtaaaagtgcttggatagtaaattaaatgtgagagatttacctaatttaatgtgtggaaactgtttaaatgaatcttttggtgatgttgtattaaacctgaaacaaatacttcacagtctgcatatgtactaatattataaacatttaaaaagtaccctaaatcctattcttttgagttccttctcttttctccagtaacttcaagtgccaataataccttgtttgtgttacaattgcattttacaaagctaaagggaaataatttgtagggttaacttttgtgtgtgtgtgttttgatatactcttgaggttttggagaatacacattatcccctgtaatctatgattgttaatctgtcaatctattgtacctcttttcttttattaatatagtattattggatttgagacatgtaaactatgcttctctaagcaaattagttgaatatattcgtgtttaggttataaaaaatgaaagcaagaactcttaacatacttggcatcctgtgttttaaattcttttcctaaaactatagctttgtaacctgaatattaggtgttagaaattttataagacaatgggaaaataatggccctatattgtattttgcttctaaatgctattagggtatagaattgttctttatttaggcagattaattttaagaagaaagccataatatatgatggacttattcaaatatatattttagtgttatttatatatttgtaaaatgaatacgtgtgtgtgtgtatgtatttgtatgatatattttaaatggagatgtctacacctgttgattgcattaagcatttagtatcccctaatgaaggatggaaaaggtgctgccacactgtctaagtggatcatttctccttggtaaattacacacattctacttttttgtattctgtgaccttgcggtcagtgacttcagcccagaatagtttcagagtcatgtaaatgaatgcaattaaggtattgcctatcatcttacatagttcagatggaaccttattggatagagaggtttatttgctttatgagaaaggtcaaaataaggttaaattttattacataaaatgatttggtaatgtttttatttagctcctaaaaaagtaatgtcctaataggaaatgataatgctttttgtttttcctttatcacctggaggtctcttcaggttctgtttgtttttgtctgattataaactctattttgaggagatgccttctgtcgactaagattttgggaacatcctgcctgtagttaagattctagatatctttgacttatacacttaggtgacataccctgttaatgatgtagggtagctttggtgttgctgatgtgtaggcatacttcattttattgtgcttcactttactgctctttgaagataattttgttttttacaaactgaaggtttgtggcagccctgcattgagcaagtaccattttttcaacagcatgttttcagtttgtgtctttgtggtcatgttttgataattctcacaatatataaaactttttcatattattatatgtgtcatggtgatctgtaatcagtgatctttgatgttactattgtgattgttttgaggtaccatgaactgtgcccatatcagccggcgaacttgttcagtgtggtctgactgctttacagactggctgttcccccatctcatctccctttccttgggattccctgttccttgagacacaacaatattgaaattaggccaattaataaccctataatggctaagtatttaaatgcaaggaaaagttgtaggtctcttactttaaatcaagagctagaaaaggttaagctcagtgaggaaggcatgtcaaaagccaagctcttctgaaagctaggcctcttgtgccagttcaccaagttgtgaatgtaaaaggaaaagttcttaaaggacattaaaagtgctactccagtgaacacatgaatgataagaacacaaagcagcctgatatggtttggctgtgtctccacccaaatctcatcttgaattgtagttcctatactccccatgtgtcctgggagggacccagtgggaggtaattgaatcatggaggcagttacccccatgctgttctcgtgatagtgagttctcatgagatctgatggttttttaatttaattttaatgatttatttatttctgagaagaagtctcgctctgccgcccaggctggagtgcagtggcgcggtctcagctcactgcaagctccgcctcctgggttcacgccattctcccgcctcagcctcccaagtagctgggaccacaggcgcccgccaccacgcctggctaattttttgatttttagtagagatggggtttcaccatgttagccaggatggtctctgtctcctgacctcgtgatctgcctgcctcggcctcccaaagtgctggaattacaggcgtgagccaccgcgcccggccgagatctgatggttttataagaggcttttcccactttgcttggcacttcttcctgctgccttgtgaagaaggtgccttgctttcccctcaccttctgccatgattttaagtttcctgagacctccccaacaatgcggaactctgagtcaatgaaacctctttcctttataaattacccagtctcgggcattttttcatagctgtgtgagaacggactaatagacagccttattgctaatatggagaatattttagtagtctgcctagaaaatcaaagcagccataacattcccttaagccaaaacctaatccagagcagcgcctcactctaattccacaaaggccgagaggagatgaagaaactgcagaagaaaagttggaagctagcagaggtttgttcatgaagtttaaggatagaagctgcctggataacataaaagtgcacgatgaagcaggtaatgctgatgtagaagctacagcaagcttccagaagatctaggtaagatcattgatgaagatggctacattaaacagcagattttcagtgtaaatgaaacagccttctgttggatgaatatgccatctaggactttaatagctagagaggagaaaccaatgcctggcctcagaacctcaaaggacaaactgactttcttgttagtggataatacagctggtgacttgaagtggaaaccaatgtttggccattccaaaaatcctaagccccttaagaattatactaaatctcttctacctatgctgtataaatggaagaagaagcctggatgacagaacatctgtttacagcatggtttgctgaatattttaggccccctcttgagaccaactgctcagaaaaaaaagattcctatcgaaatattactgtttattgaccacgcacctggtcactcaagagctctgatggagatgtacaaggaagttaatgttaattttcatggctgctaatacaacatctattctgtagcctgtggatcaaggagtaatttcaactttcaagtcttactattgaagaaatacatcttgtgaagctgtagttgccatagatagtgattcctctgatggatctgggcaaaggcaattgtaaaccttctgaaaaggattcaccattctagatgccattgagaacatttgtgattaatgggaggaggtcaaaatactaacattaataggagtttgaaagaagctgcttccaccccttatggataactttggcgggttgaagacatcagtggaggaagtaactgcagatgtggtggaaattgcaagaaaactagaattagaagtggagcctgaagatgtgactgaatttgtataatctcatgagaaaacatggacggatgaggagttactccttatagatgagcaaagaaagtagttactagagatggaatctactcctgattgaagatactgtgaacattgttgaaataacaacgaaggatttagaatatcatgtaaacataattgataaaacagtggcagggtttgagaggattgactcccatctagaaagatattctactgtgggtaaaatgctatcaaacagcattacatgctacagagaattattctgtgaaaggaagaatcagccgatgtggcaaacttcattgttgtcttgttttaagaaatcattacagagaccccaaccttcagcaaccacaagcctgatcatttggcagccatcaatatggaggcaaggtgcccaccactgaagagtaaaactctctaaagattcacatgattgttagcatttttagcaataaagtatttttatactaaggtatgtacattgtttcgacataaagcttttgcacacttaatagactatagtacagtgtaaacataacttttatgtgcactaggaaaccaaaaaacttgtgtgacttgctttattgtgatatttgctttattttagtgatctggaatggaacccactatatctctgaggtatgcctttatgtgcttagagacttgtattaataatgcctgagtaccatgctggttggtataggacgtcagacagcgacactagagtcccaactcatctgggtagaatggacacctaccacccaaccaggctgattgtctgggccggggggattaggagagcattgaaataagatactggaggagtcttactgatgaagaactgacagtgaatgagtggatgagagagagaatgtgcatgtgtgtgtagtaattaaaggcatatatttttcattgtagttggtccatataaaactaccgtcttctcttttatatttttacttaagcctggcatattaattgattaaggctctgtgattaattgatgtcatttatcagacatttactgagtaccagctgtataccttgcaccatgctgggtattgaaggctcacagacacagggagaataacaataagcaagatacagactaagtgacctacaggtatagtggtgaagagctggattttggggaagtattactttaagcaatttgttatctttaagtggttttaaggagactgaagggcccccagtaaaatgaaatgaaaatgaaaaatagctactttattttgggaggttagaattcaggtttacagatgtatttttattcaaagctataatctgtgagaactgatcataggttataggctaggaattgagagttctagaagtataagtcagatctaagtggcgtggctgatagaaatggaatgctgctatggtggtatcagggagttcgcatggtacctcccttatcaccgctagcttcactgtccattggcctgttgaccaaaataaagtttcctcagccaccacaatgttaaattgtttgctacatctcttgctggccaaaaactttgatccactcttttgttcctgaaagtatgaacttttccacgtcagtgtcattctatatctagtatggttctaattctgagtttaacattttctgttcctagtggtacagaaaagaaatgaggtgtttcaaactctgcaatgactgttaaataattctaatactttttctcccagaatccttgactgaaattcctctttatctttgacattaactttttacatcattgacaatagggacaatctttatagtaaaataaaaacagatgagtagtgggccgggtgtgctggctcacgcctgtaatcccagcactttgggaggccgaggcaggtggatcacctgaggtcaggagtttgagatcggcctggccaacatggcgaaaactcgtctctactaaaaatacaaaaactagccgggcgtggtgctgggcacctgtaatcccagctacttgggagactgaggtgggagaatcgcttggacctggaaggcggaggttgcagtgagccgagatcacgccactgcactccagcctgggtgacagagggagactccacctcaaaaaacaaacaaacaaaaaaacaattgggtagtgtattttggcaaataattctgtaatgaaagctgttttgttacatgtggtcaacaactatgtccaaagaaagcatgtatcatgaagaatatgaatacttttttttaccttgtaatacatcttttttgttgttttttgagatgatttagttagtagttaaaattccattgtaaaacaaatctttgagataaggtgcacttgaagtaacacttatttctcttaattttcaggaagtgtttggattgtgagctatttcagaactgttctcaggactcattattttaacatttgggagaaacacagccagaaggtattgtcttttgtctcattgccccacttttaaaaatgttatcaagcctttccaattgtagaaaagtaagactgttatgccacattttgttatttttctttaacttttagatatggataaactaccttgccatttgtcacaaagaaggttatatttcaattttggtaaatcaaaattttgtgtaagcgaataaaacgtctggtttagagtaaaccagttttacctattttaaacactgaggtatttacattttactttactactatagaactattttaaagaatgtcttgatttgaaaatgagatacataaagttcctttttatctaagacagtgtgaagtatacctgaaacattcaggcagtcttaaaagtcttcctgcctgtgacagctctaccttctagtgtagggatcagctgccatctgcatttggatcagtctgtcatcagagtccgtggacagactcagccaggccacctggttttgcctccgaacatccatttgcgaaattctctctttgcattatcatttgtggatagattggtatagcataataatttatctgcttgtaggcccagagtgtcaggacatgtgacatattactaggaaggaaggttatgttaaaatcatctgttgagaaacttactcactttgtgctttgtcttttgtaccttatcttagtccatttgagctgctgtaacaaataccatagatgggaggcttatacaccatagaggtttatttctcacagttctggaggctgggaagtccaagaccaaggtgccagcagatttaatgtttagtaagggcctgttcctcatagatggctgacttctcactgtaacctcacatgggtggaggtggccagagaattattgggacctcttttataagggtactaatcctgttcatgagggcattgccctcatgatctaatcactcaccaaaggccccacctccaaattaccctcacattgcaaatatggtttcaatttatgaattttggggagacacaacattcaggccatagcatacctcatagatcacatatggatatgccagccaatttgactaatgtcagtggtgaacatagtcttcttgatctatatccaaggcatccttcttaatattcgaccttatacctcctctgtatcttgtgttttccttctcaaaaacttttgccagctgtcttgcttgggatagaaacagatgaaggaaggatgcataaatacatgcaataaaataatgtatttgttaagattatagtgaattggccaccttcttttactataatacagatgtaactttattagctgaatattcatgatttttattcatatgaaataatacaaaaattggtttttaccgattttcttaatcactgtcaagcagtgtgaatttctagggttggttgaatacagtcttttaataagtctccccagcatgctgcattgaacttttaaaatggaaactctgtgtttaagattattatttattggcaaaccagcatattcttcctctttttgtcggttacgggggaaaggcaaaagcaaataagaaatgtaaataagcaaattaggtctgtgaaagaacttgtaaatgaacccaaaaaattaaatttaaaatatactttatcagtaaaataaattatatgatcagaaactggattttatggaattcagagttatcttttcaaattaaagatgagaatgaactattataaatatttcgtataaacattcacacttagctataaagatggaagttataattttaatgctaatatgaattatcaattcatgaaaggttatcatatctcaaaattaaaggtatgtttcaatagagttgatagttattcttattaaaaagaaactgcaaagaaattgaaagtttagctgaaggattaaatcgacaaattcccatgtatattcaagataggaattagttttaagtaattattttgaaaagaaatcataatgcataaggtccttttaagaagaagtttcttatttttatacaaaacctcctgaagtgtaacttcatgtaatcaaatagacacccttatttgctagcttgattgttgtttatgtaagtatagtctgagtaactagcaccctactccagaaggcttattgtaatttgtgtattttctaatcgatcctgcctctacctaacaggaatagtctttggcgtcttttactatagattagttttgcctgttttaaactatataaagttggaaccatgtcgtatgaactcatcagtgtctttttttatcaacattatgtctgtaagagtcatccatgttgtgtatgttatttgttttttccccctaaattgtctatgttctattctatgattataccaccatttatccattccactgtaagtggacatttagttttctttcgagtttgtgtctgcaaataaggctgctgtgaacttttttgggtcttttggtagaaataagccttcatttctcatgagtacagtgtaagcatgggagtggaactgctgggtggtgggatgtgcatgtgtttagagtaataggtacttacagtgcttttaagaatatttaggaaatgtcaatcagtgtgtcttttgttaatggtaggttttataattagagagacttatttttctttgacttaatgtaaactctaaagttgtttcttaggagttatttaaattttcccatctattaaaaaataagttacctattttctgattccattataatatgtatttggctcacaaaacctgggtttgttctaaccctagtgaatgaaactaggacacaatatcctcctctatgtacttatgatcgtatgattgaaatactgaaagtggattttgaagcaaatcaggcataacatgtattgaaggctttttttattagttgaatatttggacacctctttgaatatttaaagtaatagatacttttgagtcacaaaacacttatttcagcattcctgacaagcgtttcttgtgacctttgtgtttttattattctggtgattaaaattgatattattcattctagcatataagtatttgaaaaattaatctttttctaggtctttcctatagagcagtgctgttcactagaagtataatgtgagctacattatgtaagtttaaattttaaatgttaaagtttctagtagctatggttaaaagtaactggtgaaattaataatatatttgatttaacccagtatctgcaaaatgttatcctttcaatgaataatcaatataaaattatgagatattttgcattgaaaaataatgtaaatctgtactgaatttttgaaagctggtgtgtgttttgacgcacagctctctgaattctgactagtcatctttcaagtgcacagtagccacatgtgtctagtgattgctgtattagacagcacagctatagagttacattttgggtttttaaaagacagtgctttagtcaagttcatgactagttaaaattacccttaaaaatccagtagaaaggtgccatgtcaaatgctgaagtaccatctttcagtaagtttcaaacagcctatttttccttctattttggaataagtagcattttctttggttgaacatcagataaatcaattagccagtgtttagggggcatgttgaatgacagatacatatctttaaactaaaaaatcaaaatctgtaacagtagattcatatcttccatcttattccagcttctattatactaggtagaattttacttttaggggaagtgtgtttttcttttttcaaaagcatggctggcttaattgaatgtgataaattgctgtatgctgtaactccaccatatttaataaaatagggaagtttacagatagtttgtatgtgtacatatagatgtgcctatgacttctcattacttaggatatttaaaggttacctaaattttgagggttaatgtttcttcatgtttatttttgccaaatgggataaatcaagactataaaccatctcacattaatgtgggtttgattttgccaccaaattgggttttaaagcttcttggtattcaaaattgggaatgtggataagggactattgacctgtgagaacagtcaatatggaaacttattgtggagggaatagccctttgagaaataaacggcataatcacactttagtgcttgttttggttcccagatctgggatacagtggttgttttatagccctacccccaacacatttttgataatactacctccacactcttaaatgaaattggtactcttgttgacactcaattcttattgggtagtaagaaaagaaaatcatttctctgcttaaaagccttcacctcacttggtataaaactaaagtccttgcattagctgaaaaggcgtcttctcagtgaagcccaccctggtgaccacacaattcaaaacggaagcctcctctttttcctctctcctttatgctgttctctttttccaagcacttaacacctttaaaaatacaatgaaatttgtgtttctttttaaagtatagtttatttattgtttaatctttctaaaattgggactccctgaaggcaagaatttctgttgcgttcgttactaataaatctgaagaagctagtctgaggctgagcatctagaaggaggacatacctgtttatagactagttatttattgaatgcatggagaagatacacatttttttttatttctgaaaatttgcctttataggttttctggggcagggaatatttaaaggaaatgaaaacaaaaattgtaagttataagcataagaatacatttggatgatttgaataatttgaaagtagtttttttcatcaaactgacatacacatccctttgaaaggtaatatgtaaatatgaagttttcaaaaaatagggtttattattatggtcaggtaatttttcttataggtataaatatgtgtttttttcatttggataataaaattatgttggtaatcagtctgagaagtacatttataaaagatttcttctgtttctgtaaaatataggagacatacattatattttggtatcttagtatagatcaggcagagctcaaaaggttttggaaagtaatttttccaaatttcctctttggaaagagaagtatagtttggctttcattttatacaggtggtatctaattgtagttctcaaagttttatttttaggtcaactacaataaatgtttttaaaatagtacaaaaatttaattaaagacataccaagttatggtatatggtaccctagaatacattcaaaggggacattataatgtttgttacattgtaggataaatatgagatgataaatgtgatcaaagtctttcctgaaagtctgttggcaggttcttggttttatattacacctttacatatttaacatttgattgcagtcaaccctaattatgactatgtcaataatcattttcattggaacaggaagaattatgagttttggtttctttgtctttccactgccattttccaaattcaggctttattacgttctgattattagatagttattagatagttactgcagtaactttctatttggtcttttgccttttagtttttattacccaatacattctacacagcaaagtaaaactttctgcagaaaattattattaccctgaacaaagacctttgctcacaagataagacaagtcctatttctacctggttccttgcatatctcatgatcaaatatttggtttgccccttccttaagcatgttaattgcacatttcttattctgccacattatttttgctatcttcagctcagatgtcttttgaaccctactagttttcttttaccaaaaggccatccatcctgtgatttgtatgatcactcggacagaagggaacatgtgctcccatctactttctcctagtggttgatgaatgccattcacactgcctttatttttcatagcgtttcattcatcgctgcagcaaaattataaacttctagatggagggggttgtatcttttataaatttgtgacttacaaagcactcaacttgatgcctcccacatatagggtgataaatcaaagtattggtgaaacacaactccagagtgtgtcctgatataattttaaagcttagaaacgatcaaaaaagataaaagttcatctttgttatattacgcaagttacttacatttgtgcaacagttttttcatgtgctttgtatgaagacttgaaatgatatcatgtgtgttagaaatttacaggttgcaaagtgtgatatgggtaattatgacagtactcagactttattttgttgaatatgtacatttctttgacttaacttactgtgatatgtagaatgctcttttaatgttccttacctgaataagcaaaatttatttaatatgttagctaaacaaattttgcttattattttgcttaaattttgcttattatttccttataagttactatagacttaatattctttgctgttcatcaagagggaaagtacaaacgcttttggtgaaagtaataaattacctgcttagaatgtaacaatttcaaagataaaagttttgttaacttcccaaaatttatccttagtttttcatatttaattcacattggggtaaagtatatttttaaaaaagaatcatttcacagatttccctaaatttcttcaagataaacccaaccttttcaattctatttcttaagagtattttttaaatattgctaagtagcctgcctggctagtggagattctaaatgggactgaattggggatagtgacttttttttttatttgattagggcatggttctcgtgctaagaacagtatctaagaatgaaataagtttgactttcagagatatccccccctccaaaaaaacccccaaaatctgaagatcatgtatatctgggtagtgggtgtaaatttagttcacagaaagaaatggtaaaaggttaaaggaggaaatgagtttcatagaatcagcagcataagcaaagatgaattctgtaatcatacatagaccctgaacatttgggctgactgtggttttatgtatttaaatgctgagatgttggtgacacggagtagtagcagaaactgaatttgggaggaggaaatgattatagtttctcaatcttctttactgtaacaaaatatgatgtgcaattgggatacccttttggcaactgaataggtttgggaagttaactttattggccatctagattatgtgggcagtatacacagccctttattatctagggcataaagtttagaaaatattcagcatttttttccagtgtaggttaaaaaaatattgatcttctggctttattcatatcacaaacaaaaattctgaaagacagcctgtttattgtcatagaaatggatataacctcacaaggagtgttattaaagttacttttgtaagtgttttaaaaacatgggcatgcagtttgtattaatagtgatactcctctactgagttactgctaatttgccattttcgcagtaatttcagaaaataagaaatcgttaacattattgtattatttaaatactcccatggatttctattaaggatgaatagcatcattacagtatttgttagaaagtcatatacatcacgatgcctgtaatcccagcactttgggaggccgaggcgggtggatcacgaggtcaggagtttgagaccagcctggccagcacagtgaaacctcgtccctactaaaaatacaaaaaatcaaccggccatggtggcacacaactgtaatcccagctactcaggaggctgaggcaggagaaatgcttgaacccaggaggcggaagttgcagtgagccgagatcgcgccactgcactccagcctgggcaacagagcgagactctgtctcaaaaaaaaaaaaaaaaaagtcatatacaatttaaacttagtctggtgaccacagaaagctattttcttagttttaaaccttttattagtataacctctcttcatcttggttactttaatgtaaaatgagaattatacagactttatttttatagcaacattgtatgaaatgaataaatgtgaactatttaaattggctcaggcatttagacttgtttctgataaacttatcacatgaatactacttattaccttgtaaacttgtattttaaaagaaaacatttatttgagatataaggattcctgttttctcttcagaaaaagcagaggtaattgttatttttttaaaaaaatttaaaacaaagggtatatttctcttttacctcttgagtaggcattaagagcagctactgtcacagccacagttaaatagaatagtatggaaaatgatggctttagaatcctaagatttatatttgagccctgcatcttcacatatactcttagtaaatcagttaacctgagcttcagttttttgatctgtaagatgaggatacatcttacatcataagaatattatgcagaataaatgaggaaatacataaagtgcatcagtgtaatgctatagaaagataatgtgttatggacaatattgttaattctaatgtatttttcaaaacaaagaaaataggtttttggatgatcactgttttacttaatcaccatgtccttctaattagaacctttcttccacacatttttatttttattttttattttttatgttcatttacttttaagagtttccacaaacctcggtccatgcttttaggattcctttcaagtttgaaccacttaacatctgccacctactgacctagttctttccacttcctccagctctcctctcctcatacacacttgtgtattatgtttgttggatgattaacctgtctttcatttcatttttgcaaatatctagatcaatactgggttaggaaaaacagtttctgaatttgtttgaactataaagcaaggtggtacataggagtcaataataatattcattttttccccccaggaaaacagttttcaggggaaacaattagtaaactcccacatggacttgcttttcgtttcatagtatggctgtgataggttttaaaagtgatttctgcctacatatccaggttaaaaaaagttttcagtataaagcatgagtttggaagtgactcaccacatatggaactacttcaaaatgcatgccccttaactactatttgaatttttataggtttgtagttttgctgactgcaagaaaataaaaggctcagtgccagttcttactgggtcaggatttattttaaagtaccaacatttcctcagctttttgatacctaaaaagtcctagagattttcctgcaaaaagttttaacaggctttattccagtaagggaaattcagggtgtttatcctgtggtagtaacaaaagcaagggatttggtgaatttgcaatagaaattgccagaatctagatgaccctaggaacatatttttatttaaagagtctagtggggtccagcaaggacttgtaattatatttgtgtctttagcatagctccaggaacaagaaatttgatgaatgatttgtaaacagatggttaatttttcatgaaatgatcaggagaccaggtgaccaaggcaattgatctcacactgttgaggtttactggggagtgattgtggaatgccttactgtgaaacacactgacttgagtttgaatcccagatttaccccttaactgagaaagtcaccaaacttctcagcctcatctgtaaaattggatagtatctattttacaattaatgattaagtgaaataatgtatgtcttagcagtattgtaacaggtatttactagtgtctaattaataaagttaataatgataactgacaataacccactcgataattgttttaaaacttacattccatgttgaaagtcaccattacagtatagaagtatacttgaggctacttaaaatctttaagaaactgcatttcagccaaagtagtgtttatgggtaaatggattgaagttgacacaggctgtgatgtggtggttttgaacaagaccagataatctaggtatgaaccccaactctgccacttacttactattgttgactgtgggcaaatcaccttacctccctaaggctcagtgttctcatctgtaaaatggaaataaattcatagagttatttgagaattaccatataggaattaagcctacgttaagcatttaacgtagtcctggcacatagtatgcagtatttttttttttttttttttgagacagagtctcgctctgtcgcccaagctggggtgcagtggagcaatctgggctcactgcaagctctgcctcccaggttcacgccattctcctgcctcagcctccagagtagctgggactacaggtgcccaccaccatgcccagctaattttttgtatttttagtagaaacagggtttcaccatgttagccaggatggtctcgatctcctgacctcgtgatccacccacctcggcctcccgaagtgctgagattacaggcgtgagccaccgcgcccggtgatcattttaatttttcagctttctcagtggcccattatttaaaagaaccatatttgaaatcaaacagactactttatatttttgtaaaatcatttttacatcacacacatcttttggtccttctgtggcttcagacttttaattccagtcttaactcacccttctgctgcatctcctgcttcatttcctgaatgtagtgtgaccaggggagagcagaaggaagcagggattggatctgaaatcagtagacctctgtagtcaaccttacaatgagcaagacatcctctctggactaaagtccttagttaaattgattcagttgctgctttttgaagttttaccaacagaataactttaagcctttgtttactattagagaatatggtgagaaggttttgaaggaaatacctactttttttcagtgacttcgaacggtttttttttttagagccatcatttatccaaatattttttcaaaaatgacagctactaaaactactgataactaaacaattactgtatattacagatactgtgttaaggatagagttaggtttatcctataggaaagttttaaaaaatatcttctattttgtctacagtaagttacttgatagtacaaggagtttattagaattttcaaagtttttaagacttttataatgaggcagtgtgtggtttgttaggtggttgtagtgagaatttgaagagttcttgttttggatagtcatagttctggctttgttattaatggcttggctttgagctaaaaatcaaaaccctttgactcaaaattacccctttgggtcaaactatcactgacctacttccttcctccactttgaacttaggattacttcagagatgagtgggagcatctcagatgaatgatggtgtcctccaagcgccttccagagtgtatacacatagaaagggaatgtggtgatcctccaagcgccttccagagtgtacacacatagaaagggaatgtggtgtcctttgagcacctttcagagtgtatacacatagaaagggaatgtggtgaacctccaaccaccttccagagtgtatacacatagaaagggaatgtggtgaacctctgaacgccttccagagtgtacacacatagaaagggaatgtggtgatcctccgagcgccttccagagtgtatacacatagaaagggaatgtggtgatcctccgagcgccttccagagtgtatacacatagaaagggaatgtggtgatcctccgagcgccttccagagtgtatacacatagaaagggaatgtagtgatcctccgagcgccttccagagtgtatacacatagaaagggaatgtggtgatcctccgagcgccttccagagtgtatacacatagaaagggaatgtggtgaacctccaaccgccttccagagtgtatatacatagaaagggaatgtggtgaacctctgaacgccttccagagtgtacacacatagaaagggaatgtggtgatcctccgagcgccttccagagtgtatacacatagaaagggaatgtggtgatcctccgagcgccttccagagtgtatacacacagaaagggaatgtggtgatcctccgagcgccttccagagtgtatacacatagaaagggaatgtggtgaacctccaaccgccttccagagtgtatacacatagaaagggaatgtggtgaacctccaaccaccttccagagtgtatacacatagaaagggaatgtggtgaacctctgaacgccttccagagtgtacacacatagaaagggaatgtggtgatcctccgtgcgccttccagagtgtatacacatagaaagggaatgtggtgatcctccgagcgccttccagagtgtacacacatagaaagggaatgtagtgaacctccaaccgccttccagagtatacacatagaaagggaatgtggtgaacctctgaacaccttccagagtgtacacacatagaaagggaatgtggtgatcctctgagtgccttccagagtgtacacacatagaaagggaatgtggtgatcctccgagcgccttccagagtgtacacacatagaaggggaaggtagtgatcctccaaccgccttccagagtgtatacacatagaaagggaatgtcgtgatctattttaacttaaatcatcatttcctgaatttatttggccttgggacctcccttcttccctccttaccacctatcctcctctctccctccttccatgttttcctccctctgagtgagcacttattctgtagaacattgttaaatatgtagtcattgggagcataattttaccatttaacttattagaactctatatttgtactgcctttgctttggtaatatgtttattttcaattcttaattaagaggaaaccctgtttgtaacatattattcctatgagaaaatatgatttccattgaaatatcttgttttattgtcatgtgacatgttgtctaggcatgcagcatgaagaaagggaaaacccctgacttctaccagaggaatcaatccaacttcgtgttagtttgacttaacccagtgtgggaaactgtgtgaatattcgtaaaaacttttctgtgttaataaaaatataagtaatagaaggccttactacaagtaaagtaaacagtaagggtgtatcttctcactcaacaaaaaatttggagtattggcagttaatgaattgtcataatgatcttattagtgtcccacatggtattttctgttttctactctgccatcttgagtgacttggtgatgtcactcctcatggttgaaagatggctattttcccacatttccttgtcaacttcactggtcataattaaatcatatacccatgcctaagccctgcctcttactatcagagtagacattatttgtcacaagtggctttacttaattgggattcacctcctgaggggaagagggtgagtttctacaggtggataaggaagaggacagtgtgtttttgaggaggtcactgcagtgtttgtcacagctggtgaggatatgagttttgctcatctctgcagactctctggtgagatcacaaagtacagacatgtttattatttatttatttatttatttgttttcctttattggagacagggactctgttgcccaggctggagtgcagtggggttagcatagctcaccacagcctcaaactcctgggctcaagcaatctcctgcctcagcctctcaaagcactgggattatgggtgtgaactatgcaccctacccagtcatatttattgagtgcctgctgtatttcggttattcttctaagtcctggggatagaacagtgaacaaaagagaaaaaaaattgctaccctcctggagcttacattttattggtgagatagacaaataagataaagcaattcaatttatggtatcttattaagtgctaaataaaaattgaagcaaagagaggagaatggagggtattgagggcaggggcaggggagatgtccaggaagttttagatgacacccagggaaggccttactcggagggtgacttgagtagaggctgagtcagcatgggagctagtgatgcagccctctgggaaggagagtattccagtcgaagttcctgtggctggagtggggtgagtgagggagggtcacaggagatgaggtcagagggggaagcccctagaaagttttgagcagaagagtggcccaatatcatgttttagcagaatcgcttcagcagttgtgttaagtagaccaaagaggtgtcaaaaacagaagcaaggaaaccagtgaggcggccattatgataattcaggagagaaggagatgacttgaatggggacagtaagaagtagctgaattctggattctggattccaaggtaaagcctgcagaatttgctaaaagattgtatgtgggtgtgagaggaagagaggcatctcggatggcagcctgaacaattggaagaatggagctgatctgagattaggaataacagggactcagttattgacatattaaacttgaaatgcttggagacctccaaatggggatgtcagataaacacttgtttatataaatactttttggaccaatgtatattttttaaaagaacgatattgaccattaataataggaaatgacttttaaaagtatgtaatttcaataataacaataaagaataggaaatagaaaaattaagtgttatatggagtggatattttatgttccattgaacaacacagggaaacactggaagtaattttaaaataagagtattcaaataaacatttgtacactgtacatttatttagtgcctacgttagtgttaaaaattgcatattaaatctatttaatctttgaatcagtgcctgatttttcagccccaaaccttgtaaaaaatatacatacaaaaagaaatacaacccaaggactaatggtgtggatgtagttttatgactgtttcctctgtaacgtgaagcaatgatccttctaaaggaaatgtgttattaaataggcgatcttaccccactccaacttcctcagtattgtgtagcctgtagttaatgtgcaagcacatcattaaaaagaaatccaagcccagagaaagaatcagtacagtatatcttatgcaagtttatcaggatgaatggcttctcactccctttcttttgaagaggaattagtgtgagatgtcttttaacaagattattgtactcatttgcatttaacaagaatgcagcacgtagctaagattttcaatccgtgtgcatcacataaaatgccaaaaaagcaccttataaagtacctttcacatgctagatactcaagaagtatttggatagcaaatttgatttagagtatcattcacatttctaacttatttaaaatatttttaagtattatactacatgcagtggttattgcttaacagtgtgtgctttacctgtaatgcaaggttgttgagaaaattgaattgtattttttttagatggaagtaccatataataaatataaagagttatttattgtgcaagtaaactttgctctttaaaatggattaagtatttctcatcacagttttggctgtcatggtgaatatatgattgctggcctgtgtgaccaagtagagagaaaaaagcccgtttagatttagagggaaaatgcattttgttaagaacctgaagtgtattgaattactccagtttacctatttctcatgttaagtaatttttgcaaaatgatcatctttcatcagacagttctgaagttcgcagtaattaagtaagcaagcatttatgttagctttatttgagaccaaagtggtggtagatatgaattagcctcattctttgattgaccaagctataagtttttatctgccagtcagtttttcaattcttttgagtgtatctctttatatactcctttggttttgtttctaacaaggagaataaagaaaatctgtcacctaacagttaacatttgttcatgtgtgaaaattattaagatgcttacctaaacaagatacttgtcaaagctctgatttgccacaatatagccacttgttttctgttatgtaagtaacccttggtataaacaggaatgtatttgaattatgaggcacaatatgacagtgatctgccaagaacctaccatcgagcatagaatcagacttaactaccacagctgaatctgtcgatatgttgctctccttgcccctggtgtcttgcaaccgctttcttcaattttgtgttaatcatttactgccttttaaataatactggtttttacattaatctttaagtaatatgttactttatgtttttgttttgcgaaaatggtagcattctgtatgaagtcttcggatacttgctgtttcaaatttttttttaatttagtttttgtgggtacaagtgtatatattcatggggtacagagatgttttgatacaggcatgcaatgtgaagtaagcacatcatgaagaatgaggtgtccatcccctcaagcatttatacatttagttgcaaacaacccagttacactctttaagttatttaatatgtacagttatgagacttgttttttcaacttatattggttttttgaaatttatttatactgctgtatgtaggtatagttcatttatttccactcctgggcaatattccattgtgtgtatttatttcttcccctctgtgtggacatttggatggttgctgggtcctttcgtttgtttgttattgttttgttttgttttgtttttgatatacctatgttgatatacttacatacatatataggtgtacttatatttacacacatatgtatgactattataagcattgctgatgtcaacgttcttttatatgtgttctgaagaagatgtgcaagactctagggtatatacccaagagtagatatgtaaagaatgctcaattatatgaaataatatgaagttgtttccaatgttatcagaccagtttacatttcattaataatatatcagaagtttctgttgagctacatcattgtcagatctaagaattgtcagactttttaactttttccaaattagtagatacagtggcatcgtattatgatcttgatttacttttctgtgtgataacgaatgaggctgaacatcttttcatgtgttttttcatcattggtgtactatcttatgaaattcttattatgtcctatgcccattatgtactcaaaactgtttttttatgcatttgtattctacatatttttaattttaaagtaacacatacagaaaagttacacgtacaatacagtggaacttttttcctctgttgacttatttcccatgaataaacaagtgtgtgtttcccagaaagaaacaagaccttgtcctggaaaccacaacaaaaccatcaaaatcattgatcatcactactatctaatcgtcagagctcattcaagtttccaggttgtcccgataatgtccttttcagcaaaaggattccatttagaatcacactttgcattttattgtctcatctttttggtctcccacagtctggaacagttcttcagtctttgactttaaagacactggcatgttagaagaccatgtcggcccgtaattatgtagaatatcttttcctttagggttgtcttctgtttcctcatgattagatccatgttatgaatattgagcaggaatatcacagaagtgatactgtgtcttctctttgcatcctctgcggtggcatacaatttcattttgacccattactgttgacttttcactgggattacttgattaagatggtgtctgctaatttcatctactgtgaaattactcattttccctctgtaattaataattattttgcatgcaggtgctttgaaactatgtaaaatccctttcctgatcacagttttagttaatttatttgtatcagtgtgtgcttatgagcccgtattttattcagtgagctgtaatccgttactattgtaacttattttggtgcccatcttgtccctgattttgccagcagtacccccttcagtatctttttgacatgtcatcccttgatcatactgatatctctaatttcattccaatcctataggcttcaattatatttccttccctttttgtacctcctcttatagtgagaaacctgactaccatgatccttagtgttactttatttgatcattctccctgtatgtagtcaatctgccatttctcctgtccctcaccctgccccttagttttacttgagcctcaaagcccctttatgtggaagccgttctcaccccacatcgatttctacattgcacaccacagtgcatctttttgtggatgcccttctgctccaacttgggcattgatacccagtgctggaccactcctgtgcaaggacttctctgtcatcctgctcacctcaaaccacccttttcttaatttattggatgcaaaatggcatcttattggtcttgatttgcttttctgtgattgacaataaggttagacatcttttcatgtgattattcaccattagtgtattctttcgtgaaatgcgagttcatacctttcgtacattatatacttaaaactttacattaaatacttttatgtcttaaattttttaaaattttaaaataacacatacaataacaagaacaatacagatctagagcttgggctcgaattccccataccacatcatttcttccactccacagtgacaccaacctcatcctgcttgagctctctgactcctcttattagggctaccccctctctattttgcccatttttaattaaaatgttataggacacacacacacagacacacacacacacacacacacacacacactctggataccaaagttttgtgtgtgtgtgtatatgagacagagtgtcgcccaggctggagtgcagtgatgcgttctcagctcactgcaacctccgcctcctgggttcaagcaattctcctgcttcagcctccctagtagctgggattacaggtgactgccaccacacccagctaatttttgtattttagtagagacggggtttcaccatgttggccaggctggtctcgaactcctgacctcaaatgatccacccaccttagcctcccaaagtgctgggattataggcgtgagccatcacaccaacccccaatgtttttggcagtgtattttatggtgttgttcatttttcatcttctgttgtatttttgatgaatgaagttttcaattttaatgcatttgaatttattaatcttaacgctttgcatatagttaacctttctgtgtcttaaggaaacgtttcctactatgagatcataaagatatcctcttatattttgttttaaaaatattaaagacatgccttctctatttaaacctttaatccctctggaatttattgtttatatgttagacatcaggaatccacttttgcctccacgatgggtaaccagttgtttcaacactattgaatgatgtctccgttctctggagatctaaagtgtaacttttgtcaaatattttctctgtgtgatgatctacttctccagcaatcaatttgtttttctcctttccaggagcgcactagcttaattattagaactttatgatacattttggtatctggcaaggcaagtttcctactattttcttttggtggtaggattttttctctttcatgggcttttgctgctccatgcaaattttagaatcaacttattaaaccttttacattttgataggcattgcattaaaggcatttgtttaatttgggaagaattgtcattttacgatactgagtatttatataataaacatggtgtgtcattccatttatttggattatttaggtttcgttgttaatgccttccaatatattttatttatattgagcatgcagtatttacaagttacttttcttcctaggtatgctttgctgttggatattttttaaatgttgttttctgtttgttactggtgtacaaaaatacagttgattttatttaaaaaaagtattctaatatttagccagaattaattgaatattaacaaactgttctgataaatgtgacataacttcaaaagcacacaagtaagattagagatctaggtttttaccctgaaattacttttgatgttttaataagtattaggtgaatagtcatttttatagctttactgagatataatttacatactataaattcacctgtttaaagtgttcagttccgtagtttttatgttcacataggtgtgtaaccaacaccacagtctttttttaacagtttcatgatcttaaaaggagctccacacctgttagctgtcactctccatttccatcccttcccaccccagccctagacaaccaccgatccttctgtctagattaatttgcctattctgtacattccatagaaatgggatcacgtgatttttagtgattggcttctttcactgagcgtaataaagtttgactatgttgtagcatgtgtcagcacttcattcctttttgtgactaaataatacttcactgtatggatttatcacattttatctacttatcagtggatggacatcaggtttttatttcccttctgtatatacacaggaatggaattcctgggtcacgtcgtaacttgatgttgctttttaaggaactgtctgttccccttagtggctacactgcattttacattcccaccagtagtgtatgaagaaggtggatagtcatcttaattctacttttgcattctccaaagagtaattgtaatacattaggtttatcttaaagtatgattgttatttaaaataatgagagaagtggcagtgtattttacatcagactcatttttttcttcaacttttattttaagttctggggtacatgtgcaggatgcgcaagttttttacataggtaaacatatgccatgtggtttactgcatagatcaacccatcacttagatactaagcccagcatcaattagctattcttcctgatgctctccctccccccacacctcccacccaacaggcccagtgtgtattgttccccagaaatgtgtccatgtattctcatcattcagctcccacttttaagtgacaacatacagtgcttggttttctgttccgcgttagtttgctgaggataatggcttctatccatgtccctgcaaaggacatgatctcattcctttttatggctgcatagtattccatggtatatatgtaccacattttctttatccagtctatcactgatgggcatttgggttgatttcatgtcgtggctgttgtgaatagtgctgcagtgaacatacatgtgcatgtgtctttatgatagagtgatttataatccttcaggtgtatacccagtaatgggattgctgggtcaaatgttatttctgcctctaggtctttgaggacttgccacgctgtcttccacaatggttgaactaatttacactcccaccagcaatgtaaagtattcttttttctccacaaccttgccagcatctgttgttttctgactctttaataatcaccattctgacaggcatgagatggttatctcattatggttttgatttgcatttctctaatgatcagtgatgttgagcttttatatctatatttgctggccgcacgaatgtcttctttttagaactgtctgttcatgtctttgttcaccttttaatgttttttttcttgtaaatttatttaaactctttgtaaactctggatatgagacctttgtcagcacatcggactcattttaaataaatttatgattttgtatgtaatatatcatttttatttttgtttttcatggctttatttaggtataatttacatgtatccagcaattcatccactgcaagtgttcagttggaaggttttgagtcaatgcactcagatgttgcagccatcaccacagtccggcgttaggacattttcatgtcttcacagagtctttcatgcccatttccaatctctgttctcctctcctgccccaggaggtgatctgctttctctacatacagttcagctttttaagacatttcatatataaatggaatcatacaatatagatatctttttggaatcatacaatatagatatctttcgtatttagcttctttcactaagcattaagtttctgaggttcatccttggtgacgtgaatcattagttcattccctttttttgttggttacactttatgcttgcctttaatagttgatgggcatttgttttgtttacagtttttggttattatgattgatgctgatatcaccatttgtagacagattttttgtggacatatatttttcatttctcttaggtactccagtgtacaattagtgggtcattgcaaggttatacattcatgtatgtttaactttttgaaaaaccaccaaactgtttttcaagtggttatgccatttttacattctcaccagcaatggaggagagtttcagtttcttcctgtcctccccaacctttgagttttttcagtcttttttttttttaatatagctattctagtgagtgtgtaatgtgatctcattgtgattttactagtatttcatgtctttagtggatgacaatgagcatctttttatgtgtttaccaaacattcacatgtcttctttggtgaagtacctttaaatctttagtccattaaaaacaatttggttagtttatcttattgctgacttcaaagggttttaatatatgctgtatagtatatcttcatcagttatatgatttgcatatattttcttccattctgtggattatctttcaatttgatgacattccatttttaatttttttaaatggattgtgcttttgttttcttatttaaggaatatttctgtaacttaaggtcataagagtttatcctattccttcttctagaagttgtgttttaatttttacaattcagactataatccatttttagttatttttgtatgttgagagatacaggtttacacttaattatttattttcacatatggatatctaactgtaccgcaccatgtattaaaaagactattattttaattgcagtggcatatttgtcgaaaatcaaatgactatgaatgggagtttattctggactctattctgttccattgtctatatgtgtatctttatagcaggaccaacactgttggttaccatatagatttatagtatgttttgagattagataagtttaagtcctgcagcttcatactttttcagagttgtttcactattcttggtattttatactttcatatatattttaggaccaatttctagaaaaagattacgatggcatttaggtagatcagtgtagggagaattgacgtcttagtaatattggatctttcaatcaactgaatctttgttccaataaacaagtcttctttaatttccctcaacagtgttttgtagttttgagtgcacatgttttactcctgcctctgcttcccaaagtgctggaattgcaggcgtgagccaccgtgcctggctgcgtttcttatatactggcaacaaaccatccaaaaataaattccattcagccacaagagtaacaaaaagaataaagcttaagaataaatttaatggccaggtgtggtggcttatgcctgtcatcccagcactttggaaggtctaggtgggtggatcacctgaggtcaggagttcaagaccagcctgaccaacatagtgaaatcccgtctctactaaaaatacaaaattagccaggcatggtggtgcatgcctgtaatcccagctacttgggaggctgaggcaggagagttgcttgaacctgggaggcagaggttgcagtgagccaagactgcatcattgcactccagcttgggcgacagagtgagactgtgtctcaaaaaaaaaaaaaaaaaaaaaaaaaaaaaaaaaaaagaaatgcagttgtttgtggatcttgtcataaacctttctgaacttttttttattaattattttgggtttcttgtagagtccttagagttattggcaagcaagatcatgttacctgcatataaggataattttgacttctttttcagtctatctatctttatatttgttgcactgagtagacatcagatatccttgtcttcttcagatcttaggtggggaaagcattcagtctttcaccattagtatgatattagttgtaggcaattatcttagaaaggaaagattgttttaacactgaaacaattaatatagtaattatatatattataaatataataatatattattaatagactaaaagactaaaaacccacataaaagagtaaaaactcacatgattatctcgatagatacaggaaaaatcatttgacaaaatccaacacatcagtgataaaagcaaacaaaactcacaaactacacatagggaagagggaatagcagctgtattatatactacagctgtataataattaatagtggaaggtggaattttttctccgtaaaatggggacaaagcatgaatgtttgcgctcaccacttcttttcaacactagactggaagttctagccatattttttctcattgtaatgtttatgcagcctattttggagcatgtggaaatattaagggaaaataaccccaactccttttcctaccatctagaatatcactgttatcattgtgttctccgtcccttcagtatggtgtgtgtatatgtgtgtggggtaacacattaaaaaacaaatttgagatcatcctttatgctcacatctctgacctaatttgttaccatttttttccttgctcattactacctactttggtcatctctcagttccttaagcaggcacgtcctttgcatacactatttcttttattggaaattctcttcactttattctttgtatgactagggccttctcagcttaaatgtcattttctcagagaagcttttgcttttccttatcactttatgtaaaatagcttcctctctacctcttgctttgtttgaaatcttcaattattttattttctgtttgcttctttcctgtctctttcccatgggaactgtgttcgtcttattcatgttgtaattccaacacctagcatagtgtctagccttctaatttgtttagcaatttgttcaactcagatgaatagtatcttgctttcttagcattgtattgtgataattttaccacattattaaataaatggatctttgaaaacatccattttaaagattgtataatatttcataatataattatgatgaagttatttaaaattttcttattcattagacatgcttcttttgtcatgattcagaacacatctggcatattcagtttcactgacttgaactgaaggctaatttactcacttattaatataggaaaactttaagtattaatgttagagtagtttattttgtgttatcttttgttggttttatttaaatattcttttaatttatcttttgtgtggtcatatatttgtctcagaaggagagtgtcttagtagagaccaaccattaacataaacaattctagaatgtgacaaaatatcaaatacacattgtgggctcggaatacttttaactttttacatggaaaatgtaggctcattaagttcatatgctagtaccaagtattttgcattacctgaattgagaccattgtagatgaacagtagtagggaaaaatcagaatttattttccagagaactgtcaaggccctgtctttttccaaaatactgggatttgaattccacctcagtctcttattgactttgtgatttggggtaacttaaacccagtttcctcatctacaaactggggataataataatcaccttacagggtttttttaagattatatctgtaaaaggcttattgttatgtttgagacatagtaattgctcattaaactatagttatcattacctgttaagtctcttagttctaggagtgttggtaagagtagtagctgtaaggattcctcatggtgtcatcaacagataatgaccagttcattaataatgttcctctaagttgggcaccgtggtgcacacctgcagttccagctacttgggaggttgagtcgggaggatcatttgaacccaggagtttgagaccagcctgagcaacatagcgagatcctcgtctctaaaaataaaaataataatgataatagtaatgttcctctagagatatttccttttacccttctcaggagttggtggttttctttatagaatatgccagtttgtagggtttcttatctatatacacagaccaaaaaaagatttagcccacaagttcacattttaaagttccagtaatcaatttatagattactagttgcagcattctctttccttccttccttccttccttcattcttttctttttctttcttttctttctttctcttttctttctttctttcttgtctttcttcttttctttctttctttctctctctctctctttctttccttccttctttccttctttctttctttgacggagtctcgctctgtcgcccaggctggagtgcagtggcgcgatcttggctcactgcaagctctgcctcccaggttcacaccattctcctgcctcagcctcccgagtagctgggactacaggtgcccaccaccacacccagctaatttttttatatttttagtagaaatggggttttaccttgttagccaggatggtctcgatctccagacctcatgatctgcccatttcggcttcccaaagtgctgggattacaggtgtgagccactgcgcccggccagcattctcaaatatagttatgggtactttcttgttccaactttaaaataaaaggttataatcttttttcaagaaggaaaaaaggtaattgaaaactgaacagttaaattctactggaatttcagtgagttggtagataatgttgataacgggaagatgggcgtgccttgagtattacttcagagactggggattggagacttcagaaattcccgaggtccctaccacattctaataggagtactcatgtaattacacatatggttattgttaagttgatgtgtgaatcacatccttctaggtatatataatcagggcaagtgattgtttcctactcttcttagaattcctatctgaatttatagtcaagatttaattgagtccaagatctataatttggggcatatgacttaaccagccctgctcagtatctgttgctcctctatgaaatggaatctctgctcatttcaccgagttgtgaaaatcaaatacagtcatgtccatgatagcattttgtaactggtaaagcattactcacttaatgatgctcccatttatgtgtcagacctgtctctttcccacagctatttagtagggtgctgctggtggccgtgtgatagctcagaactacatctgtattgtgcactgcctcttaggagttttatacttgtattagggagtggaaaattttagattttttcctatttgcatcattttatttgtggtgtttgttagaaaaataatatgtatgtatttactgtagagaaattagaaaatgcaaatcagcaaaaagaaaaaataacaattacctctaaatgcagaaataattactgcatttacttttgtttaaaacaaaaattcaattatgctgaaataatgttgtttcctgtttttatcacttatatagtatataatttcatataatttaattttcttgtataatattttaatgactacataatattccatgatgtaatatactgtagtttatttaactatttctaattttttcattttgacgttttatggctgtatacaatgtactgcacaaatataataatatgtattttgaacatccttatggctaaatatttacacctatcctccatgatttttttaattaggataaatcttagacatggaattgctgcatcaacggacatataacatgttaaggcatttaatttttgttacagttttatcgaggtataattgatgaataaactgcacatatttaaggaacaatctgacaagttttgacatgtgtgtacacctgtgaaaccatcatcaccattaagatgatatttctttgtaatccctcccttgggcatccttcatccccaggcaacctcactgatctattttctttcacaatagatgaatttgcgttttctggaatgttatccaaatggaatcacacaaaatatgtttctttttgtctggcttcttgcactcagggtaattattttgagattcatccatatttattttccgtatgtgttgtgtgtattctgttttgatactgagtagtaaaattatattgtatggatataccatatgattcattcacctattgatgggcatttcagttgtttccagtttttgactattaaaaataaatctactttgggcattgttgtgtaaatcttttcatggatatatagggcatttgatatttattaccaatttttttgctgcaaagattacatacttggtattttgaaactgaaaaagttccatataagaaaactatagctattcttttttttttttttaagaaatacacgtttaggaggatttataattttttgtatgtaaattaattaatttagcacagcacgctaagaaatttgaaattaacaaaggttaataaacacatcctagcaactataaacctttttcacagcttattttgttgaagcagctacttttatcgattattacctagaaagcagagatctattgctttctgttaatgaaccagcattcataaacaattgatatttttctgtcaaatgactacttttgcattgaacttgaacaagaaaaggtaatgggataagttgaacttgatcaaaaggtattccagaatctggtttggaatagatgccaaactatcttttccctcttgttaagatgcacacttgactgaaggaggacagggaatctgaagactccggatgacatcagagctacttttcaacagccttctcaattttctttctcagaaagcagaggctcagagcttggagacagacggtgagaatatttttttcctgagttcttaaggcttaatcattatgactttaatatatttcagacaattctttctcagttataaattagcttataattcaaaatatgtattatgtacttcatctgtgcaagttacttcatcaggcaatgtggtttaaaaaatgaaagagctacaatccttcctttaaggaacttatatggaaagaataaatgtagataaataatgtaatcaaacagtaaaagaggttaaatgctgtaagagaaatggagaaaaatattcttgagaattcagtgtgtagattacttctggagagaggaattggaaagcttgaaagaagaaatagtatttttgttgacaacacttaattcgatttatcaaaaaccagagaaaatggacagttaatacaaatcctacaatagcaatccctgatttcagataaaaagttaattaccgttttgaggaaaaatagaagcatgtttgattattgtgtgtttattatagtataggccagtgattacttttggaattattaaaattcctcttacaaaggaaagagcattattagtatttctgagaaatgataaagtaattggattaaattaacacaagtaggtgggcagagcaacaaaaaagacgatgagcaagtggttaattctacttggattaacactcctgttttctagtatagctacaacctaaatgaatttgtcatgtcttaagctcttggaccttatgctgcttatttctgggaaggagaaatccaagtgaactaggtaaaggcataatgattgattattgtgctcataatccgttgtgaatagttcagtttcatctagctaactgaaaaactctggtcaaagagagagagcagatacagcatgctgaaattcaccatgttttacctgaccacagtgtttcaaaaagggaatggcaactttgagccaaatttgctctttacctgtaggcctcatatggataatcctaactgctttttcttcactattctgataatgttcagaaaacctagtaatgaagttattttaatcacccacttaaatgcttagcttttcttgtaatttcatcaagaaaatctttaaaatgttattttttaaaagactgcataaaattactaataattatttggttgcaagtcacttttcgtatattcatttatattttacttataattggaatttaaaatcaatgacgcaattatttgtaaatactaaaatttttttattcagatataattaggtgttaatcactggttggcagtctgaaatctgcttttatatttgatgaaacagttgatattgaaccccatttctgaacttctaattctattaaaattaacattataatcatgcatattcctgtgaccgccccgccacaagatataattggtttgttgttgttcttaattttcaacacctttgttttaccacatagccagaatgataagcaatgctcactggatccaactaggagttggataagtaaattataggtagccatctggtaaatatacacagccaatgagttgttcttagaaaattgtcaaatttagatttttcttccagattaaaaaaaaagacagccaggcatggtgtctcacacctgtaatcccagcactttgggaggccaaggtgggcagatcatgaggtcaggagttcaagaccagcctgaccagtatggtgaaaccctgtctctactaaaaatacaaatattagccaggtgtggtagcgcgtgcctgtagtcccagttatttgggaggctgaggcaggagaatcacttaagtcggcagtcggggttgcagtgagccaagattgtgccactgcactccagcctgggtgacagagaaagactccgtctcaaaaaaaaaaaaaaaaaaaaaaaaagacattataatgtatagtgaacaactttgaaaactaaaaatttataaaaacaaattactgatagtgattttctatattcctttcacatatttttaaacgtttttagattttaaagatgattatgtcaaatgtgttttttctaaaacgtgttgtgttaaatatgttttccttttaaatgaacagtccatggtcaaataagcttgggagatgttgggtcaaagtatagaatgtcttttcaatatgcctttcattaaccagtggactgtgtctccaaaaggaggatctggtatatctcaggagatgagtatttgacaagttgaggattctaaactaatgttttatgaggtttttactatagtttgtcttaccctgcaaaacactcatgttatatttttaagtatagtaattttttttgactgaaagctcaaagataatgattgggaggaaaaaggatgtaattaattgaatattgcaaactaaataaagaatgaagtgtttaaaaagcctttcagtgtcttaggccatgtttcccttgctattttgttagctccttcttttgaaagagatacaatcatcatattgagtaactaacaaaattaattcacccttttttatattttataggactttatatactttctgtgctgtttatctcagtgtataatatttattagctaattttgataaaattgctgatacaaaaacagagaatattttcggtagtgttaactaaatgaccataaatcaatttagcttaaacacttgaatatactaattttctctaatggaatttttattgttatatgtcatggttttccactaggacgagttctctattgtacttttttctagtttgattaaatttttgacaactatggtagaatagatgtcttgagtttaaaactttcctgtcagacataaaatatctatataaatttttttttaaaaaagggccagtactctgggcgtggtggctcacgcttgcaatcccagcactttgagaggccgaggcgggcggatcacgaggtcaggagatcgagaccatcctggctgacacggtgaaaccctgtctgtactaaaaatacaaaaaattagccgggcgccatggcgggcgcctgtagtcccagctactcgggaggctgaggcaggagaatggcgtgaacccgggaggtggagcttgcagtgagctgagatcgcgccactgcactccagcctgggcgacagagcaagactccatctcaaaaaaaaagtgccagtactgatgagctgggttacgaggttggtaaagtaggctaattgtatacatggaatgcctgtccaacttcataaaacactcctcaaagtcatatttttttttatttgtttaagaaataactctttgtaaaatgtgtttaaactttcacaccagatttttagtagaaacgtgatgctggtgaaagaaagatcaatttataatctgggtgagttgtcctagttggaattaattgccgtaaaccaatttggccttctcactagtgttttcctggccttgtggataaccctggtaagaaaatctgtatgcttggctcaaatgaatcattgttagtttccagcattgcttccatccactcttaattccctttctcacagccagccatcttcgttcagagtcttatcatttctcatctggagctcttgtgctggcaggcctgtttactgacatccttgttcgagtcttttacaaccaccagatcttcctaaaactccagcttgcttgtgttacttgtctgatcaaaaataatgtagcaattgcaatagcataatgaacatagaaaagtaatagaccttccttaatcctaacttactgttactatgggaaacattaatacaattaacatttttttaatttggtatctttaaataattgacttttccttaagtcttttacttagtatcttaattgatataacttacgttgtttggggaggaagatccctactagactaagcctccatatcaactcagattttataaagtcgctatatgcgaagcctccatatcaactcaggtttttttttttttccttttccatgaaaggtttcaaatgaaggaatcaaaataattttaaaagtgttgatcaaactgtcaatacactttctcttcttacacagaccctggtcttttttcactgaaattaactgttgtgaacctgatagtctccttgattctctgctacatttgcccttcaaccatgtggcctgtggtttgcatatctgaaaattttctgattctaacgtcagagcttatgcattttatttagataactagaatttcttcattctggattagaggtatatgagtaattttcaaacctcgcttgcttcctttttgcatttatttatttaaaaaaatgttcatagtacagtctatgtaagcttctagcttgaagctttgtctcctgctgttgccgcccctctctgcacctcctccccacctgccatcttctagcctgtcctccaagctagtgcttctcaaaatatctgcagtaaaggccaataatttgtttgtctgtttctattttattttttttagtaactcacttttattgtctttttaaaaagctatatgacagaagtttttagcaagactacaaaatctaagtccacatctttcatcattaaatttaattataacttttatagaacatgccatcaaattattttgtcatgttctataaaagtttgtcattactggcaatttttattcttggaggtgattacttaaagtttctagaacatactctatgccattgtgcttcctggactgggcttatggtcctcctactttctgaagaatactgaagcttcttttctaattgagaaagccttgtttgtccctagagtcagttcacatgcagcctctgtagagaaccttcactaaaaatggtgttccctgccttaccactcagtcttcttccaaaaattgtgtctttcagtgctttctccactttgtccatgccatctttttagtagcatctcactatgttgttgatctgttttttcccgatgagattgtgagcccactaagggctggtttatcacttagttatccttataacttcagctcttaacaacatagcagcttctttataaatatttgtacatttgttactccttgtatggtaaattcagaataataacgactctagagatgggagatttttcatatcctccttagtttactcatctttttagaaagttctttcttttctttcctcgtcttggtcttagggacattctgcacagagaacaatatttatctgccataattatagtggaaattcttgaaattagaagagattatgtttgaagaaaaccaacattgtacttttcaactattaatagcagcagctttcaaactttttgctttcaagacaactttatattcttaaattatcaaggacccaagagagcttttatttatgagattcatatcaactgatgtttatcatattagaaatttaaactgagaaaaaatttaaaacaagagttacacaaggatgcattccatgtatatagcctctagacaactctactgtacacttatgaaggaatgataccaaaagccagataacatttagtagtatgaaagtagtcttttcttcatgtgcctcctgaatgggtcatggccacccctggcatccttggaccaccctttgaggactgctgtattatggcaattcacttgtctaattgcgaacagaatcttctatatttttattccaataatgttaaccttgcttttgtgtttgtagactaataagtttttttttaataactgcacggtgtatcatattacccacttttctattaatgtctagacctagaatgtgctgaaacttactgccagcgttggcttggcagctgtaagacagagatgcttactcaaggagaagtcattttatttgtggatactcagtaaggtcattcctagttttgccctgtcaattttccccctaccccggctttcaagtcctctttatgatttgtgtaccttctaatacttcttctacggtgattcgcccaactctagaggtttggtcgtttaaaaaagtttcacaaaatgaagttgatgtgttattttgcaggattgagtaggcttcccctcaagtctttccttctctcctttgtgtgaccttcccctccacttgcctcaacctgatccctgatgctggcggtccttttctgagagtacagtctgctctctggcagatatttacttggccctggtgactcctgttctgttttactccctactctcttaccttggctgatactctgttaaattctttctgaggtctcagcgggacagtcagtctctagagtatctgacgacgctcttcaaattacattggtgctgggtcttccctgagggttctgggaatgcgttgtgtacctttcagctggatcggaataccaagatggctgctagttccgacacttgatttactgacagcttcatactgtttttactcgtagtgtttttattgtgtgatgatgtcatgcaagctggaatttgaggacttgatatcattatgagtgatcatctaaaaacatgaagctgatagaatgttgggtagtttttattttttaattctgtgtcctaaacgtagtcgggactcaagaaatgtttgctgagttaattttttttctcattagcgttggatagaactcttagctccaagaaccacattataatttaagtcggacatctctgtcttatagccaagggaaatacgctctcacactgttctgaaaaggtacatgtcactgtcttagcaaaacccttacctaatacttaatgaaggttgatagttcaaagtacaaaattcagacttcaaacaggatctgattctgcctctttaaagcacccctgtaagaattactacttttttgaaactttgtagaaatcatttttttagcacagtgtttatcaaacctaggcttgagatatagtaattatttttatcgtttttatctttgattcaataaagttgctatgaaataacaccctatcttatagcactgtttatgttaaacaaattggtttttaaatattcaaagcagccttcattgtttccagagctgtctttttcttcaactctcctgcctttgccttattttgaccatggcagtgcactaactgatctacagtttcttcttccctccaagctatcaacaactcccatagcttctggttttgtttttctaatatgcttttaataataccattgcttgtaaggaaacccaccagataaaggccagcttcttggcatggccttgattcaaagtccttggtcccagttgcatttccagcctaatctccactcccattggactaccacacttcctgtgtcacactcagctcttccttgcctttgagtgctatttctggaccctagaatggctgccattctcttctgcctggctagcccttactcattttttaaccatcactgactaccacctgcatgtgtacatatgaactaaaaacctggttacagcctatctgtgttcctagagcactttttacatatttcagtcattgcatttagcacagtatatactctctctcctttggcacagagactaaggaagaaaatcaccggcactgtgcactctcgggtcttatttactcactaggtgttattactctgtccttttcctgtcctgttcaggaaaacatacctgaatccaagtgagtgaaagtgtggttatcacccaagttatcttgaatttatttagtctgtttttttaaaagggaataatttgcaacctcttagaccttattaaattctgtacttaacactaaatacttacactaaatactctttagaactaatcatgacataccttatatctgatgatgacaaaccagcatgttatagatggagacacactgattttagcatatattgtgatttaagcattacagctgtttgttccaccagactatttatttcttgaaagccaggactattttattcacctttttccttttgttgttctagagtaatgatttaaacatttgcctactttagctactaaattaaattttgagagcattgccagggaagaatcaaacaccctctactggcattaatactttctcttttggcccatgcactggtaatgctaaaacatcaaatgtcatgctgatgtttttataacaagaccgagattgctttaccttgttttacttgtgttactcactattctaatgattttttttttccgtcttaagaatgtattcatcatgttgggaataagaaatttagtaaacatgctataatgtaattttccttacctgtaattttagtaagctatatgcagtatgcgtgaagtttgtgacttaaccaactaaaaccatgtatttttttttaaaaatgaaaattctagagataaatattgatggaaatattttttagtcttaacctgtgactgtgctacaaatctgaaagatacaaatagagctttaagttttacattcactacactgaaatatagtcaagaaagaattcgacctgaattctttaataagcacaatggaagggttgtttacttttgagaactaataactgccccattctttgtgattgtctgcttacataatttgttataaaagaatgcttctaggtaaaccctctctccagaatgctggtggtttgttctattctgcttgggaagggttaagaggagacaacatcctgtcaaagaccttgtttttaattttgcttctcacactggcacagatcctgctaagagcagcccagattagttcggaaaacctttgaagagatttaagatgtccttcagccagtttgaaggtttttgtcttgcaaatccagtacaagggcgcctgcaggcatctcgacccttgctgtgctgctgatgcagctcaaggtcacactaacccgccctgtgacattcaacaacaacaaaaaaattatgcggtgaaactgcctcagcgttcaaccaaccaacaacttcctttagtgaggaactgaggaagaagacttttttacccccctttttcttctttggggggctctgtgaatttttgctgtaggaaataatcccggatttctggtgtgtgtgatgacaaggtcatctcttaattagaacacatgtaaagaacaaagctaaatggcttcaaaacagctttgtagttgatggagaggatttaaattatttaaagagatagtcacccatgtatgatggaagctgaattctaaaggcattaactccttcattcctatctatttgtcattgctttgaattccttatgtctgactttagagggttgcattctaaacttaagagaatttataaatgcccagtttttaaatgatgaaatataatttataaatcaaattctcagataaacttttcatggagaagttttctccccatgacatctatctcctagaaacattatcacatggctggacttaggaactaggagttacacacttttccctctggcaactgtgatttatttataatgtgttggaggtgggtgagtaaagtgcttctttattgcctcaccttctctcttcctcacttttatccatttgtgatttagaagtctagttaagcaattttctcctgcctctttagaaataacagcacgtatcattcaggtttctcaactttcaaagaactgatgtaggaagaccatcttttttctatggaaaaaaaattaatcttagttaaaaatggactttaagaaagttgtttctgaacatgcatgacattttaaggcacaatgaaaccatgtccatgaacactcggtagccatattggatctgctccccttggtggggcttgtttccccatgttcctccttcactgcctgcgaatgttaactaccaaataaattagttggacaaagtccaagtgcattggctttctgtgcttgagacttaatgtatatcacctctgcaggattggagcagaacaatctaagagagtaattttgtggttgatattttctttatgtgtattatgtatagaagcacacatggcagttatttttttatccacaaaatgacattgtgtagagaaagttaccttcaacattatgatattagcaaagcagttttctcagaatttatacccagttgctttttgactgaagtagaatcaggacaagtacaatattttaagtgtgatgatttaaactgatattttggattttgtgggcgacacttaagaaatttgtttgaggggataacatgttggactgtgtgaaaacaagttagaatgaactagacttattattctgaaggatttttctcctattgagaaacaattttgggggtccatgaaatgaaaaggtgtgtatattaagatacatatttttaggtatgggtattttaaagatctcaggtttgcaaaaagaaaatattggaggggaaatctatatgtgaggaaatggttagtgtgattcattgcatcctgcccttgcctggagtctggtgtgccctaaatgtcatgtatgacccaagctcacctgctagtaatttctaatttactgtcctaattcatcgatttgttatcactaattgttcttcatttacttctgtgtagtttccagtacctaaagggttgaaaggttgctgtaattggcacccgcagctgctctttcttttgacaggggataattttgcagcctatgctttgtgtgacagctgcctaattgggcattctccccttgtagcaagcctgcctcctccagcctccctgctgacaaatggtggtggattatagatgaggacacgctgacccgttcgaccttgctgagacagcggggaggggcctcctgctacttgagggaagctttaggtcatttagaggacaaggtcatgagccaggtggagaaatgacatgatataagatgacagtagcctgatgacatggtcagtgtgtcaaggacaaatgcatcagtatcgattaaacattattgcaatacttcattgagtccctagtatttcttaattgttcctactgattttttttaagaaatagaaaaagtgcaaaatgagacacatgtattttagcagtgttaaagcagttgtttacatgaaaacagaacggcttaggatgcctcctaataagtttcttcagttattttgagtattttgttcttaatttttgcctagtttgcagccccttaactatcaatacttttcaagagttatttgaaaattaaggcaggcaaattaaaatgtggcaatgtatgttgttaaaaaatatttaacaacttctgtcattcgcctactcaatgactggcataccttttcatattttgaataaaagaaaaataagccaagtgaaaatgtctaattgaaaagaacaccagaactctagatttataagattaaccataccaccgtgatgccataattatgaagtgttaaaggtgctttttaaataattgttgagacctgaaaatatttttcaaatagcttgggattattcataatgtaaatacttcaagatacatgaaaatcttttgtatgtcttattactggtaatgcacatacttttcttggtaaagtagacttgagctattacaatatatttttaagtgtaaaatctgaagaatccatgcagagtctattaaccctatgttaatacctgaaatgataaattcatgtaaaactgcgctggatagtacaattaagaaaaatgcctagttttaaaaatggttaacagttgagtacaaagaagactgatcatgattctcgtttctggaaaaacaattgttgggcactgttgaatctaagtcctcagttcaacaggaggtaattttatgcccctgagattaaaaaaacgaggcatggtaaagtgtgatgaattagttcaccgaagtagacacatctgtattttcatggcacgtgtgtgtgcgtgggtgcgtgtgtgtgtgtgtgtttaattttgaccatgctgtgcatgtgtttagctgctctcaaaccctgactcaagcttggtggaggtttaatcctgtgcccttgtacacgtatacttgattagtagttgtggttatctcagcagaagacataccgccctcctccttgtattggtcgggacctgggcattagggagtcaaggcaaaggagaaagaaaagagattttacattagtattctatgaaagccttacggtctgcagaacaaattgattactccggtgtacctgtgcttggcaccactgctgtgagagaaaggtagggccgtaatctgttttattgtattgcatattgtgacactccaggaatattcaacatgcgctctttctagggcacgtgctgtaagtctaagtaaagaaaaaggaaataaatgaatggagagtatgtgagagcaatgggctacagctttgtttacttcagtccaagagagttcatttgaataagataattttactgaaagcgtcaccgggaacataacctgattgataatgaaaccctgtaaagtgttctgaggcactaaatctgcttccctgcttgaaacatgtgaggcagagatgaaattcaagctagtactgtaagattttaaccatcagatgggagcagtcatggaggtggttatggacatagtttagaaaattattttaaattatcttcagtacattatattcttaaagatcctatataacatggtgcaaaggaaagagattttcatgaaaaaaagaaaagaggtggccactacaccaccttgaactatattaagaaattaagaaatgtgttgtttactttattcttctgctagcttgatttgcataaacattatactgttttattcggttgtagaaaaggaaattgcatatttcttataattttttttaattctgtgattgttactcaaatagagacttgtagtgtacaatttgggttatttgaggttacttaatatgaaaggaataaatgctttaagattttataaagtgattaaaatatctgtgatagggattagactcctgggcatttttaggcattcttaaaatgtggtcatagctgcactttttcggttgtgtataaatctgtactgcaaggggagaaaagaaattcctcttgtccaagcctcttgccacatgtgaactgcaggtgcccttttccctcttctgtccccatcctgatccttcgattacaatcagaacacttgatttaggagagagaggaagcaaaatacctcatactaatacactgatgaaatgaaagttgtttcctattgtttacttttgtattcttgaaactagtatatagctttacattttttagattacatttcacttccatttaaatgtgtgaataagtgttctgtatgtagtaattatacatcctgaagacattccggagatctgtataatcacaagctatagacattggtctagactggcttgcagatacttttatagaaaatgaccaagtgaagaagcatttttaagcacctgttaataataaatatatcactctgtgacataaaaacattgattaaaatgaactatttgaggtcatattgtctataaaggggatgttttcaaagaactttggaactcccttacaaaattcagactattaaattttgtttcaattggatataggcatcaaaattatttgtactgtatttttgtacacctagttttgtgggtttttctctattgaaaaaacatatcagaaattgtagaggaaaagtaaactatggaactaaaaatcagaatattttatttttcagaattaaacatgttctttaaactctttttacttacagtttttgattttgtaattactttacaaattttgaagattttagaatctttcactttctcaaaagaaatacatggcatgcacatggttaataattagccaagtaagatggggaagttaaaataggttaccaagtagagaaaattgatattttcctttttttttcttatttatttattttttgatggagtggaagattgttttaacaggaaaggactatattttgtttaccaaagtatccacagtgcttaacactgtacctggcatataataactgcttaataaacatttgttgaacacatgaataaggaatcctcaaccaccttcccctctcacccaccccgatacattcctttcttctctcttggctatttgtggtttcaatctgtgcagtgttcatggtagtgagtttttacatgagttgctcttttgaaagtactctaggtattgaagaaacaggaatctctctgaatggtgtttatggaattgttttccagtcagagtagttcaaatgactgagtcttaaagtgtacttcttccaaatgtgtgctttgagttcttcttcccttcaaattgcctctattctttcccctcatatgcagatctactgtgttgttgaattttgttaagctgtgaaatctaattcttagagtttcatcttgtcagtttaggtacattatgcttattaaccaatatcaacaaattattttaaacatccaagaaaatcaccagttaattttagtcagatatatctaggtacattaaactatagagaaaacaaacatttgacatgttattatggctattaatttaagccatgaaatggaagacattcatgagaacaactttatgtgggtgatacttccctaagttcagtaaatgagcatgcagtgttacttggtatccagtgttagctaggcttggactggagttcttgagcagtaggaaccttaggaattattataaagagttcgtttaactgatgagaacactgggctttaggcaagttcctacttagccactgttataaaactgcttaggacctgagccagggctaaaacacaaatcatctagcttttaaaaaagtgattttttttttaacctggtatcaactctttgttcaattttatgcttctgaaataataattgttacgtttatattagccaaattttattcctgtagctgcagtaaagtttataaccaaatagaacataaatcaaagcaaactcatacacacagaattttcaattgctccctatggatgtggactcagtagacttccatgccaagaatgggtgacaacatatttagtattatgaagaaaggtattaaaatttgagaagaaaactttacataaaattacagtggccaggcatagtggttcacccctgtaagcccagcagtttgggaggccgaggtaggaggattgcttgagcccaggagttcaagatcagtctgggcaccatagtaagaccctatcgctactaaaaattaaaaaattaactagctacttgggaggttgaggcgagaggattgcttgagcccaagagttcaaggttatggggagctgtgattgaattactgcactccagcctggacaacagagcacgagcctgcctctctctctctctttctacgagagttcacactggaataaacttgtgaatacagttgacccttggacaatgtggggattaggagtcccagccactgtgcagttaaaacatttgcatataacttttgactccctcaaaacttaactactgatagcctactgttgaccagaagcctcaccaataacattaaaacagttgattgacatgtattttatatgttataggtattatatactgtattcttatgataaagttagctagaggaaagatgtctgaagaaaactataaggaagagaaaatatattcactctttgctaagtggaagtagatcataataaaggttttatcctcatcatcttcacattaagtaggctaaggagttggtgttgctgtctcaggattggcagaaatggaagaaaatttgcttataagtggacccacacggtgcaagccagcgttgttcaagggtcaactgtagcacatcacaaacacgttatatagtctgttgacatttggtatctgtggcagtgttttctttaataatatagtcatggctttgcagaggaaggcagccaattgagtctcttgccatgtggggaccaccaaggggcaatgcttgcctccttcagtgataattaaatgctgacttttcaagaaattcaagaaatattctaattcagattgttcatggagagattagactcctgggattggagctgtggtttgcagataggtcccagcggtacatgtcagataaatattcaggttaaagactgagaaggtccatccaaaattcacatgcctagttcagggtgctgacagacttagctgtaggtgggtcaggccttcaaccacatgggctactcatgacttggttttatttccagtagagaaatgaacaaggaactagagaaatgatcagaaagccaaattgaccaaacacagagatactggagaagctgctagacagtagcagtgtggtttggagacgtggctgtctcatgctcaaaattaagtttataagcttacaagtcatagggatggtggtaaagtgtttctaaccctttccttccaattactggaaaataaatctccaggcctggttctttagttcaacagttgggcaaagtgtgcaagcaaattatttcacctctttacaccacagtttccccatctgcaaaatggggattattttagtgtcttcctctttaggttatgaggattaaatgagaagacaaatgtataatacctggagtatatacaaattatatataaattgtatatataaatatatttatgtgtatatatataaatataaaaatatattttttcatatatattcaaggataatataaatgatatatataatgattatttttgtgggtttgtgtgtctacgtgtaagattaccatgtcttctactgacgtatttttttatcctgctgttaataacagacgacttgactaggtaaccataatatgggagctgtatccaaccatttatgtctattttttacctattaatttattctcagtttttaacctagataatggtctgtcactttagtcatattttttcctctcccaaagtatatattctttgtcatgatcagttatgtgatttttatttgtaccgaatttattaaaatatgtatcaaaaactgcatacttgtcagtgatcacctttccacttaaaagtataatatgtctgaaggagctgtgaatctcagtttagaattacaataaatgatttggaaaatgagagttaagagcagaaaaggtaaaatttagtttgtttaaatcttaactaaacctttatctttcttcaaatatcactcatagtttccttttttctccctttaattgtaaaaatttattggcatttagagattttttgtagatctgtaggagactggggtgatctgactttaaaagtctgaatgccgaatgaagagcagttaacacagtgcttttctcaggaaggcaggaaagggagaaatatccgaaatgccttatgatttgatttgagtttaagtgaagttttattttttaactggatagtacttataatttttaataaagtgatttatttatctttatacaagtgtcttgaaaataaggatttttcaaaaattatatcatgtaagcatctttatttggtttataatttaaataattatatatatttatttattgttttcttgtgcgtatattatgctcccagttgtttctgaatattatgttagaagtggccagggagcaactaagagtaatgacgtgcatttattatatttagcaaaaattcggtatctcagatgtgcccatggtgaacagaataaaagtggtccttgttctcatggagcaatagttatagtctagtggtggaaaacaggacataaacaaatatttgaaaagcaaggaaagcaagcacaaaaaatgacagaatgagagaagtcctaagacaactgtgatctccgaggtgctctgctagggaataaaatggggagactgtttgcctaaagtcattgggaaagacgtatcttagcgggtgatatttaagctgagtttggggaaggaggcaaaggaggcagccataagaaagccagaaagaactttctcaaaagagagaaccactcacacagacgcccaaagaccggagagcactgttggtgttctgggatccagagaagtctgtgtagctggagagctgtactgtccaatgaagaagctacgagccacaagccacatgcagctttccggaatggaggtagtctgtaggtgtaaaatacacaccaacttggaggaaggacttagtactacaaaaagaatgtgaagtatcttaagaattttatagtgatttcatattgataccatggtatgttttgttaaataaaatatactcaaattaattttactttttttcaactttgaaaaagtgtggctactacaaaatttaaagttgtattggtggctcccattacatttctgttggacatcgcctggctggagcgtaatgaatgagcaaaggactaaatgatgcgagataaggttggtcagatgcactggagccagttgatgcagagccttccaaaccatagaaaggaattcagactttattcttaagtgaaatagaaactattatgagtttttagccaagagatttaccttttacaaagagcattggctgtagtgtggaaaatgtgttggaggagggccagttaggaagtgagtacagtaatacacacacacacacacacacacgcacacacagctaaaccagttatcacaacagttgtcagacaaatttacattaaaaatagtctctctaatcaccagtgagtttctcagtcttatttgacagaatttcctaggctatagttttacatatataagaattctctttctttcatatttatgaaatattaaaattcttacaaaattaaatctctcactctcccagaacactgtaattcatgcaagtttaacacgactttaaaatcatttatagctttaaagattctgaagcgttttgacaaacctacatttcataatattttgtggttcaagtaactgatgatttattggaagctactgacaatctcagatcccataggcctacatgtgcatttctcagaaggccttgtatcccaggtttaagaaacctcctcatacagtccagcctgtaatcttcccaactattctctgcagtaggactccttctccctcttttgtaaatgaagaaactgagacttaattaaatgcaagctgccaaggttaatactggtaagcaaatgacagtctctaggctaaaactcagatctttgacatatgtcttgtgatttctgcttatctagttactccttttatttagtatgtatgtggttgtctgtctgcatgaatgtgagttacattttccatttgttttatttggatcagaagctgtatttgcaataccatcatttaatgtgtatgaaattggaataattattaccctttgggtttttattgttacttatactactgagtgatggcaaaaggttttggatttattttgtagtactgataaaatacaaggcaggtgagtgtaggtttttgcttttacttcagagggaaaaataaaatttgtttgctctagaatacttgaacttgttgagtacttagaggatagcagacacaatgttaagtgctttcattttttttacagccctgttaaatagttaatattatccctagaatctcagaaaagttactgcctgaacctaagattcaaagcctggccacctgactttaaggctggttctcttagcttcagtgtgctgtctacttttttaaggtatctttgaaatgaaatgtcttcacaaaatgcctgttgtatatcgtttgcagttgacaacaatgtttttcactgtaaaaagcaaagttcatttgaaattccaatgaaaatttctatttttaaaaaattgtttcttgagtgaaattaaagttgatccatgtcatatcactcagaaggctgatccttttcagtaagctaatagttttattttctctagtcaaatgaaaataataaaaaagttagatagcactcaagaaaactctctgtatagcataaaaatcttgcaatttgcatgtaatcccagcattctgggaggctgaggtaggcggatcacttgaggtcaggcgttcgagaccagcctggccaacatggcgaaacctcgtctctactaaaaatacaaaaattagccaggcatggtggtgcacccctgtaatcccagctactcaagagtctgaggcatgagaatcacttgaactcgggaggcggaggttgcagtgagctgagatcgtaccactgcactccagcctgggcgatagagcaagactcagtctgcgcccccaccccacccccaaaaaaatcttgcaatttgcctttaatggatggttttataaacaataggatagaggaatcaatacgcttattgtgactaagcagtgtcatatgattgaaagtaccaaggcatagtaaaatatataaatacatgatccaactgtagatgtcagaatctgtcaggaattggaaataccagatacttggtatgagtattataccgaaaattgttcaagatacttgagtataaaaacattttcaaagtagtaagtaatacaaagaaggaaaaaggtgaattaacatttcttgaggacctcctgtgttggattggacgttgtatatacactgtcatttttttttttgagacatatctctctctgttgcccaggctggagcacagtggcatgatctcacctcactgcagcctcaacttcctgggatcaagcgatccttccgtgtcagcctcccaagaagctgggacaacaggcacgtgccaccacacccagctatttttttatttttatttttttagagatggggtctcgctgtgttgcccaggctgacgttgtcatctttaattttcataactgctccattaaatacattgttatacatgttaaactgaggctcagacacatttaagctggggttacagagcaaatggttgaccctcagtgttactgtttttaaggctcatggtatcttttagatatgaatatagaagggatatttgtataaatgaagatctttcagaagtgaactgtggaaaatctgactcgtacatttaaattgttgaggttgacaatttgtggattggagtggtatctagtcctctgagtaaccaatacagtaaaatagtttatgaagtcaagtataggaagcttctcagccctgatttttttttttttttggtcattactggtctcgattttagttggttatgtgtgatcatcttttatctccagactcaccactgataacacaaaggtataactacatagccatgcaaaatacaaggtttccctttgcaattgtagaagtgcctttcatgtcaacatttttttgataattaaaaactgattattgaacaggtattttaaggtttaaccatttttatcccttctctctcataagtttgctgagatttgacaagtatcagctatccaatgaccattttttattatatagttaaaagtagagatgcaaggtaaatttttatttagttgttctgatatttagattttaatgtttgtatgtgtatgtcttaatcttaccatttattcttccactttgctagttatgcaggactccacttaacccttttattctgaacatatgggacagccagttctacttcataatgtttatgttattgaataacatttttggaagaaatgtattgccaaatttagggacttttttttagtgcactgtagatgtttttagcatattgaaagaatattctttctttcacttgtgtcacttcctaggagtattcctacagtatacgtatttctggggggcagtgagcgggaggacatcttacttggtaaatcagttttgctaattattttgtagcaaacccatctttatagttagactttttggggggtgaggggaatagtttaagttttttattttaaaagcttgaatagcattctcttatgtaaacggaatgtggacacttaactgttttcatcaatatgttataaactacaaaactcactcagactgaattggtaagttacattgtttaagtgatatccttgcttctgtggtttatttcagatgtagactctgcaggggttggtggctcacaccgataatcccagcactttgggaggcctggtcgggggatcacttgagtccgggagttctagaccaacctgggcaacatttcgaaaccccgtctctataaacaaacaaacaaacatgtaaaattagccaagcatggtggcacgcaactatagtccccgtctattccggaggctgaggtgggaggattgcttgagcccaggagtttcaggctgcagtgagtcatggtcacaccaccacactcaggcctgggcaacagagtgagacctgtctgaaagcatacaaaacaaaacaagactgacttcctttgggctgtgtacaatatttagaatagaggagaaaatgttggtcagagaaaggggaaaaggaaaaaaaagatgaaaggaacgcagctttttaattctggatgaggtttcttgctatctcagatgtaaatagacaacatttttagtcatcttccaatttaatattaggaagtcttttgacaaatctttatcatatgcctgggtgttaataatattgtggggaaaatgaatggaacagtgaccttgcttccttttatttcttcctttctatacaagagtattttattccatttactttttgaaaatttgacattatttatgcaaataattttatttcctttttatggccatgatattctctaaaactcaatggcaaaaattctggagtgacacttacaagtctccctttttgtgggtaataggggaggtgaaataaggcatcttattctgtcaggagtggaaatgcatgcttctgcctgaaaggaacatcagtcctacaagatagagcagaggaagaaaggcagagtcatcatgtttagctgaactaacaacattctcaaaaaggcctttaaaataaggaggtaaaataactgaagcccaggaaaatgcagtagaatctcaaagaggatcttgttgagctttctttttttaaatgaatagagtgaggcacaaagagaaaataacacctagaacattttttcttctcctttatctcgtagccccagagttccaaaagttggtttgcatggacagattcagagcagtcccacagagcccaggtcctgttaataagaagaggcatgttacatgatacgcacaaagaaagtaagtgagaagtagttagaactacagcagtggaatcttttgcctctttttcttagccatcacaccatggaataattgttgttcctgactccttcctttaggcaattgttgtcaagacattttgggccagggctgtaatctaggaccaggagccatcagagtttatttaagaagaagtagagacatgcggcaacctaatagttgacagcagcaaatgaaacgagaagcacgtagagcccttaggtacaactggccttacctgacctagggtaacccttcttcccactcaacttcactaatgaactttgcaggcagtgtgatggctacttattattagatgctatgtccatttattattataaatacaggcatatgatgctagaaatgatagaagttagctgtatcagggtccctttatctaatattttgccatctagccctctgagggagaaccatctggtctttgtttgctggccaacttcaacataaccatccacccagtctttgcattagagtttcactttaggaattcattttccatgtctgttcacacatatagcttgaacaccagcatctcttttaagatttcattacctcttggctgtttcttactgttgccctctggctcttaccttcttctagttaatagtcatagtacctaaattttgtattgggaaaagacattccctctacactgcctcattaattctcatccttactcaagtctcttcaaccttgctcaaggctcatcatctagggcttggacagccctagtctgacccaaacttgggcattagtatttgcattgcttaaaagtaacccaccccggccctccctagtacacagttcccagcataaggaatatggtggcattatatcagtatctgaatgccagcaatgttcatgagtaagacaggtagaaatacattcaaacttgagaaataaaagatggagaaaagaagaaaataaaccatgtaagaggaggggtggagggaggcaggaagagagaattgttgagagggaaagagtacatgctcaccttctggagcagctcttaggctagtggcgctagaatcgtgactgaacccacttgacggatgcacatctgattctagagtattcattaggaaatactcttccacttaatagtctagatttattgtcatatttacaaatttacaaagtaggagaagtggggaaaatgggcaaggaaataagctacctattctctttcatgtttctttttttttcatgattaataagaccagtattttagtttcattttcatgtgaaaatgacaagtttttgtttattttctagtggccctagtctaaatgaattgttctttttgaatatgaaacgtgtttcttgatatccaaaaatttcaggctcccctcctcctcacctccacacacacatagactatatatgttcatgtatattccatgactttggagtcagggaaactgcttggctaatatgaacataaagatttgtctacttttaattttaatggaatagagggaacatgataaagcaaattaaactgtaaagttcttcaacatcagttaagtttcacacagctgcagggataacttgaggaaaggacatgttcagccagatggcctatgctggcttccttcccattcctgtgaaagatatgttattcactcccagggtagctcagggaaggagctgattatggaattaaaacaaccaatgtccaattaacccctgttttggtcaacgtttcctacacagtttggataattggcatactttagtttcatcaagggaggcagttggtttattggttagtgcaggcccctcggaataagaaatatgaaattctgttgttggttccgcccctacaaactgtaagtatgaccttggacatcttatttacctctttgtgctgttagctttccccatttgaaattcagagccacatgttgctctttgaccatacgtgaggtaaaggcaccataggaaaagtgagaaaaaagagcgtttgcagagttcttcaggaccatggattaaaatgtgcagtttgtcttacataatgttactgcagtatcttaggggtggtgtgattacagggaacagaagcccctcaacaaagctcaggtacaggaggacttgttagaggcatgcagcgaactcttcaggaacctggtgatcggagtactttgcccctcctgaagctggaaagccattcattcagcacctccctgctgtcccttccctctcctctcctctcctctcctcgttttgcctccctcatctctgcttctctctgtgtgcttacttcaatcttttctctcagaatactgactcctctaggcactaatctgaaatgtggcctcatgaagtccactccaaaatgaagctttctgtctccctctgaattccagatgtcaagagaggaaatgattggtccattagttaggttcccagtgttgttccattctcctgaggtctgtggtttgggtataggttcttaagaaaaaggtttaggtaaggaagaaattatatgcatcttttgtatatgaaattactttttgctttaagtaaacctgtcacacaaaattatgagtgaaagaattaattacctagattattaaattattttacagatccaaatgctttttctttagtttttcaggatatatatatatatatacacacacacacacacacatatatatatactatctatctatattatctatctatctgtctgtctatctatctatctatctatctatctatctatctaaagacaaaagacaatcctaagcctcaaggagctttatatagggtgactagtaagtcaaaaaaaattttgtttgagaaagttctctgggctgaagctttgtctgtgaatagtaaaacaattaacattcattgagtgcttagaaaatgtgagatattatactgttttacatgtaccttttatttaatacaacagttttataaggtaaatactattattattccttttacagctgaaaaaactgagcctcggaacagttaagtaaatccaccaaagtgacccactactgaatagcagagtcaggaatccagagactgttcttttcaccacaatgctttgtggccttcctaataaaagcaagagactgacactggcagagacaagattttagagtgggaaaagtaatccagaattctcagagtgctgcataaattttgctttacgaaaagttttcaaatccacatttgttacagtctgtggcaattgaatatgataggaaagactgtgttccagaagaccttgacgtggttttggatcaggcatttactggataattaaccaaccactcagttgttctgagctttagtgccctggtaacatgggaatgaggataaataatgtattaaccaaccccgtgaggagaatcaaagacaactctatcctagtatttcattcgaggaagggtgagtatggcttaaagcacctgtgataaagcagggcttttaaaatgtaaaatacactttgtaggaatcaacggtcagtgacaagagctcccaggaggttttatacactgttttggccagtcaagaatttgtaaagaattgcatctctgcagcacccaccacagactggccccaggaacatttgtcttcctttgattgccctttgctaagcccctgtcaacaatgggttttcactatcttatcttggccttaacaaggtgacagacctggtcagtggaacctggcagcaggtttctaatgtttgaaaggtaactgatggattagccttgttttttgtgtccccaaaaagaccaatagtcagactaaaactcaacagattatagctcagtgcaaggcagaatttcatactgttggagttacgcaaggaactcttactgagcagcgactctgtggctaggctatgtgagcattaccacatttgttcagcccaggggctctatgaaacaggtattagtgcttttgcacgtttaataatgataaactttcaagagtagccaactttcctatgatcaaagagttggtaaatggtagagccggaataaattgaacccagagccatccgtctccaaaagaccaccttggaagatagttcatggtcactagaggtttttagaaataagctagatatccagagatagcaaatgggttataaaggggattaagcatcagacaggatgattgattaggcagatgacttttcaactgcctcccaacctttaaattatgattctgtcatgtttggagaattactttacatgccatgctattatgaaaacagtagccagtggcaaaattattagaggaaaatagatttcacctcataaaaattagctgcccttccaattggatacaagttctttaaatttgtgtaatctggtattatgaaggataagatgtttgtaagtttagtttaagtcgttagttcaaatgaataaaatatatgccaaaaatctccgttttctaattatagacaaggaaatttgatttgatgtgtcatatatttaaaacaaatacctaaacaattgcctaaataaaagagtgtcttaactatgcattttagaacactaggtttctaaatcttacccattcacagcaaagtgagatcttttctggacccacatgactttttagccttctcagacctgagaaatgttattaaagtttaatattatgccataaggcgagagtggatctgaaactctttgaaagaggtcaaaggagtgatttgtcttgattttatgtttctactaatggtaacatgctaatatggtaaaaagttgaaagccgtggcaatgacacgtgagtcgtcttgcatcagtattcaagacttatttgggtaatggttgttgttgttgaattggtttttagtttttcaggtttcagttatttaaaagggaatttcactacttttttcataattaatcactttagttaagatactgtttttatttagccatattcattgaacattcatacttgaagctcttcaacaaatacagattcaaattaaaaagatcattccaagaatagctttgaccaatttgatttaatctttatcacacatttaaagggctcaaattctttggcatataattattatctgcttcaatgattgatttttaaaatgggcacagagaaatagtttaattgtggttgatactgtaaaaaaataaataaataaaaagcctttcttgcataaaggcttactttgcctatttcattgtaacttattttttagaatgaatgtctggttttagagactaaatcttttgatgtgatacttcatttcttaatatctccatcaaaagaaaatgtaacaaagtagtattttaatgttaactgggttttcatctttatctaggggaggtaatttgaaaaggaaaaatgatgaaaagcttgatggaactggtattttgaagcatatactcattcttgatataacctaaatccataccagatcttactaaccttgacatgggaaacagcaactaaaagaaaccaaattagtatgatcagttcttcataaacaagtggtaaaataaagatcatcttacaaaaactttaaaatactctaaaaatatgtatatttttaaaatactttgccaggcatggtggctcacactggtaattccagcactttggggggccgaggcgggtggatcacttgaggtcaggagtttaaaaccagatgatagatgatagatagctggcttaaatcttgtgggttttctaccataatattagtcacgcatgttttctaaacccacagaactctctgtaggataaaatacttttttattctttaattttgtgcctttttattaatttatattccagggaaaaagatatattggatctgaaaccatcattttaaataacattgtcatatcattttaattctcctatttccatagaattatgacagcccactccttattttgcagaccaaggctccaaaaggtttacttgctgtttacagcatgttctactaggaatgctgcctctgctaggtgctaagatgtaaagatgaaaaagacataattcttgcccataaggagtttatactctcatggggaaccaggccttaacgaaccaaaacacaagcatacctcagagatattgcaggttcaattccagacactgcagtgaaatgaatacctcagtaaagcaagcacattttttggtttttcagtccatataaaagttacgtttacactatactgtagtctgttaagtgtgccatagcattatgtctaaaaataatgtgcataccttaacttaaaaataccttatagctaaaaaaatactaatgatcctctgaaccttcagagaactataatctttcttctggtagaggccttgcctccatgttgatggctgccgaagaatcagggggaggttgctgaaggttggggtctctgtaatgatttcttaaaataagacaacaatgaaattcgccacgttgactgacatcctttcatggaatatttctctgtagcatgtgttgctgtttgatgatagcattttacccacaggagaacttctttcaaaaagagtcaatcctctcaaacctcctactgctttatctactaagtttatatttacagaatattctaaatcctttgttgttttttcaacagtgttcacagtctcttcaccagagtagattccatctcaagaaactgctttctttacacatgtgtaagaagcaactcctcaggctcggtgtagtggctcatgcctgtaatccctgcactttgggaggccgatgtgggaggatcacttgagctcaggagttgaaaaaaaaaaaaaaacccgcaacaactcctcattcatttatgttttattatgaggttacagaaatttacccacatctttaggctcacttctagttcttttgctttttctaccacatctgcagttgcttcttccactgaagtcttgaattcctcaaagtcatccatgaagttgcaaatgttgatatttgacctcccctcatgaatcatgaatgttcttaatgacatctagaatggtgaatccttttcagaagcttttcagttgactctgcccagatccaatcagaggaatcacttttgatgacagctaaagccttagaaaatgtgtttttccaataagatatgaagtcaaaattactctttgatccatgagctgcagaatggatgttgtgttagcaggcataaaaacaacattaatctccttgtacaactgcagcagagctcttagtgtacaggtacatggcctgtaatattttgaaaggaatttttgtttttgtccagtaggtcccaacagcgggcttaaaatattcagcaaatcatggtgtaaacagatgtgctttcctccaggctttgttgttccatttatgtagcaaaggcagagtagatttatcgtcatttttaagggtttaggatttttggaatggtatatgagcattggcttcaacctcaagttccagcttcatcagcctttaccaagagagtcagtctttcctttgaagctttgaagccagatattgacctctctctagctatgaaatttctagatggaatcttcttccaatttaaggctgttttgtctctattgaaaatctgttgtttagtgtaaccaccttcatcatttatctcactcagctggatcttctggcttttcttgctgagcttttctgtcagcatttgctgcttccctttgcagttttattgttttctcccttaaatcgtatgagccacctctgccgcttcctcacctctctcagtcttcatagaattgaagagagttagggccttgctctggattaggctttggtttaagggaatgtaatagctggtttgatcttaaatccagaccacaaaagctttctgtatgtcagcaataaggttgttttgttttcttatcattcatgtgttcactggagtgacatttttaatttcctacaataattgttttttttttttgtatttgcaatttggttaactggtgcaagaggctgagcttttggcctgtcttggctttcaacatccttcctcactaagcttaatcatttctagcttttgatttaaagtgtgagacatgcaaaacacacagaggccattgtagggttattaattgatctaatttcaatattgttgtgtctcaggcaataaaaaggactgaggagagggagagagatgggaacagctaagtggtggagcaatcagaacatacatatttattaagtatgctgtgatatgggcacagttcatggcaccccaaaacaattataatagtaacaccaaagatcacacatcaccgtagcagatagaataataatgaaaaagcttgaaatattgtgagaaatacctaaatgagacatagagctacaaagtgggcacatgctgttggaaaagtggtaccaatagacttcctcaacagaattgccacaaatccttagattgtaaaaaaaaaaaacaaaaaaaaaacaaaaaaaaaccccacaataatggcaaagtacaatgaagcaaagcacaataaaatgacgtgtgaccgtacagttttgtaagcaagatgattgaaagatctactgagtgccgtggagtcacagagaggaacaactaccctcaggctatggagttcagtgaaggctgcctaaagagaggatgagttgtcagctgagacttacagaatgaaagaaatgtcctagttgtttagcttgactgtaaacaaatggggcttattacaggattctgtatgcatttttaagtctgatgtatttttcctcaaaagatgaggatggtaaggatgatatggggggaagggcactaagcagaaggttctttattcttcttactgccctgtttctcccctgctgtcttatttataacctcttgtttaatgacaagaatttctatagaacaaattatatattttatataaatgtgataattgaaatcaagggaaagaccaaaacacaaagcaaaatataaacagtgggaaattctgatgtaaagatttaagtaacttaagagttgaatgaactaggaccgagcatcgtggctcatgcctgtaatctcaacactttgggaggccaaggcaggaggatctcttgagcccaggagcttgagaccaccctgggcaatatggtaaaacccgtccctacaaaaatcaaaagttagtcaggcatggtggtgtgtgcctgtggtcccagctgctcaggatgctgaggtaggaggatcgcttgatcctggggagtcggaggttgtgctgagctgagatggcgctgctgcattccaacctgggtgacagagcaagactctgtctcaaaaaaaaaaaaaaaaatcaaatgaactactaaatagtgaagagatcaatatagtatatatgtactattccacacatcattctatctcaagacaaaaagcaacagaaaaatgatgagagattttcattaaagattttagttttcagtgttaaagtgatttaattttattaaatgatgctaatagtaggaagtaagtagttgtttttaatgttctttattgttaagagaaaagttgttctgaaacatttttggtccaacaattgaaatcacaaaagccctgacccacattccctagaccgctaatctgcctctgtctcctcagcacaccggagtcatcctctaaagcctcctgagtctccccaacctgggtctgtatctgactatgagtggcaggtgccatgccaaggagcatgtgtcactgtccctgctgcacaggcagaacgtgccctaaacctggacaacagcagaactggttctcagattagcatttactggctattgttcctgagattagtacttcaaacacttggttgtatggatagatgggcaaataagagatcagggtaaagcacgcaccgcagtttcttcaataaaaataaataaaaccatttaaagtaagtaagtggcctgctgatggtgtgctggtagcttcattttccaagttgacagacatactttaatgttacctgtgaaaatttaaagacatagaatttctgcaggtacattgtgcatgtagtatttttggttttgattccttaatcctgtaggatgggacctagtcagatttattgactcttcacaggtatcaccaccatgtctgggtgctcatgaattgtgtctgtagtgatatttctcttccacagcttgactggaaacttctatctagatatctttgtgtttggagcctgtaatgactagagtgatgtcatataagtcatttcaatagtatttaatttgataatttgacataatttttcttttttactttatttttgaaaaactagcaatctttctaggatagtaaattttgggttattttcatgcaaaggtatttaatttatcaaaaatatgaaaaaccactaattgagaacatttacatgtacatatagcataagtagtttgcaaattgtataaagctacagcaggtggtacttgatttagcaaggaaagcttttatagtgtaaatttaccccaacagctttatgcatccttcaaaatgatttcttgaccagaatgcttcagtaagaacattgatcacataactcttggtttcataaatgtaacttaaaataaatttaacatcttgtttaaacagctaaaacaaaaggcatgattttgttagataattgcatatatgtatgtatttattttatttttattttattttattttattttgatacggagtctcgctctgtcacccagctggagtgcaatagtgcgatcttggctcactgcaacctccgccttccaggtttaagcgattctcgtgcctcagcctcctgagtagctgggattacaggctcatgccactgtgtccacctaatttttgtatttttagtagagacaggatttcaccatgttggccaggctggtcttgaactcctcccgcctcagcctcccagagtgctgggattacaggttgagccaccacatctagcctgcactaatatatttaataatatattcctttaagaatcactttttgtttttgtcattgttgataactaaagtttcttttgatccctgtgatttgaaaattgttgtggaagactatggataaattataaaacttcttttgttgaagcagtgacttacaagttaagtctgtgtttttgggaacaagtgacccaaggcattgcagagcatactactaatttcagtttcagatgggtcaaaagcttggaattatgagagagcattatctattcagggaactgcaagttaagttaattttaaaattgtcacatggcaatgatcagttataacaagcaaacaaataaaagtgcaagcatatatatatacaggcacacaaacacataaaaattcacaattctggccgggtgcagtggctcacacctgtaatcccagcactttgggaggccaaggcaggtggatcacgaggtcaggagttcaagacaagcctggccaagaaggtaaaaccccgtcgctattaaaaaaaacaaacatactggtttctcctcttattcttgatccaatgcaatatatttaacaaaacatactttataataagaagtgcatgaagatcttgacttcaaagatggggaacatttttaaaacagagtatatactatgtgggtaagtgcagagtgtctaagtgtactaaaaaccctaggagctttgatcaaaagccagctggttacatcagttctgttggtaatctttcttgctgatctgtgaccttgaccttgtgcttgtgtctgtatgtcaaatctattttagggatggggaaaccatagttgagtttagtaggattgatgctcccatctcaaaggatatccctgcatatatactataaacactcaagcaattccagaagaagaaagatccattttccattacatttcttattttgatagagattggaaaatattatgctcttgaaaactgatagaaagcaccagttactccaaagagctgttgagaaaggtgagaagcaaacactctctgttaattttgtatttacactcttttcttatacttatgtgctgccaaaataatttgttaatgattattttgtgttcattaagaaaaactattgtttctttgataacagtagaaggtagtgaatagacattagtactaatcataaataggtatgtactgtctgtcatgtaatagttttctggagctttaaaaattgtaggtaaaattaactttatttaacaattttccagtgtcagtattttcaagacagagtgaagtacagcatccagaaatgtattgtgtttttgaaatagaaattgtttggcagtttagctctttctctagctcctttgtctagatctttgatttttaacttaaaatctccaactttttcatcttaattttgtttaaaaattaaatgtttttaagattaactatagaggcagtgtaaaatgaatagcaaatttattgaatccgattcatatacctaggccttctgaggagaattcaaaacaaagaagcccttctttattttgccgtatcaattatggggtgtttctttctgtcaccagaacggttatttcatctgtctcttttatttgtgtcatcaaagatcttaaatctttgtgattatcctccattttattcagtatatagctgttatgagataagcaaaagttccaatttgaatataagctcatatttagcttttaaataaacatctgtttgcaattctgtgaccctacagaagaaagttgtgaacatagataccttttggggcattaggtgggttgagtgtgtggctatttcaaaaccatttccttcccccggaatttattgaaaagacagtaaaacatattggtcagggctatttccacaactttatgacagcatatcatctttctcgttaaaatgcttgtcattttcatcagctataatttgacaaattacttggaatcataggaataaaattttagatttagaggggtcctcatatacatgtgtccttgcgttgaatgcttgagttactcccgcaggagtgtctctaatgagtcttttttagttgggaatgtgaatgacactattttactcctatggaagcagctgacgagcaagttaaagccaatggacctagaagttaggagcaaatttggccttgggccaaaaaattaagtccttcaggttgcagtggagagcagcctgggcagctgttttcgtcaccggtgtctctggtgtccatgccacctgtctctgaggagtatctgcacctaaaatgagaacccctgggagagagcaagaaactcctcagttctcatttcaaatgttgaggccctcagttgagcaaaatgtatttagataattatttttggcatctgttaaattgtatgaccacacatctaccttttcataaagataatacttcaaagaaagttattatcttggaattcagattcccttaaaagacatatattaattttgattcatttttttcaagtaattagaaatatattttaagaaatgaaacttcaggcatattcttttattgtcttattattccctgctgtgaaatgtcaacacttgaatgtttcttttattcctttttaaatgttttttccagtgactttttaattgataatagaggattcactgttgtcttcttaaatgaaacttcgggacccatacctaaaatgttacttttcctttctttttatgtgaaattaagtgttgggttttacgtattttaacttttcattggcccttggtttggaaagctactttcatcccttcggataaaatgtttggagttacatcctgttggtaaattgtttttggcttagtgtttctcattcagcttttaaaacttcctttcaaagccctgctttggagaacaacgagagttctccgaatacctggatctgtattttttttaaataaaagagtcaataattaggactttggaatcttcttagtatgtacttagatatttttcttctaatgtttaatgaaacatattaatgtttttcttaccatttgtataaaaatacccctgaaattatccacagtggaatatagataataatattgtccattaggagttattcttgaatgacataattaagtagccctttgattacttacgcattttgaggaaccaggcaaagccaagtgtcctaatggtcaaagctgcattgtagaaatccctttaaattcagtactcaaataggtattacttgatattgcagaacaaattgggggagatctcatggacacaattggaagtcatgaggtagtccttagatataatttaaatggcataccaagtgaactcgtagatgtttaatcatttaaatgtgtttttaatggagtatttaattgcaagtaagatactgaatccttaaaaacagctggagaaagaccgttgtcattatttctctattctcaaccaaaaatagtcctacatgtaagaattctgccagatgcattcttcatttaactaagtaaaattttatcacttggattttatcattttaaagtgtgtagaagttccacaaagtttccctttgtttaataaaccatttccaaacagaaaatgtaaaacatattgcaatgaaaatagtttagctattttagagaatcaatatagcacccatttgtgaactgttagtatgcacagtatttactactgtcttttatttaaaaagctctaaaaaaattacctatcacttagttctgtacttttcagatacttataaaaaaaagtaaatgtagctctttttaaaatatactgtgtaattcaagcattttattagatatttcattaaactagtttgtgttgaaacttagatctttccccaaatcaatctacgcatatggtgaagattccatggaattttttcatggtttagtttgattttattactttctaaaataattctttttcaccacaatgattttttccaccacatgatgtagatcagtaaaatcttaactttataaactttaaaggatttttatgcttataaacaattttaaattaataaaaggaagattctgtttataattttaacattgttaagtagttggacatgaattttattatcatgaaatacattaacctttggtatactatcagggttctttggactcagttttagttttcaaatgcttttttaaaaaatatatttgtaagtggtaggaaggataataccacatttttgaagttttaatgaatgtgtccttaatagactcaaacatagtaccttgctgttactatatatgtccattggaaccttttagaagtcaaaagtacatatggaatcttagtgatcttattttttctgtatctttaagtattttggcattttaccattttggcaatgaatttattatttattcccaactgtcctttaaaaaaaaggctaaaataataaaaagtaaaaataacggaagtgtctagaaggatgaggcaatactgaaatcatcactgttttaccgtcattctattcctcccctcccctccctttctttctttctctctctctctcccttccttccttccttttttttttttttttttaaagaaatagtgtcttattctgtcacgcaggctagaatgcggtgtacagtaactcagtcatagctcactgtaacctcaaactcctgggctccagtgatcctcccacctcagccttccaaagtgctaggattacaggctagccaccgtacccagccccatcttcagttttcttagagcccattatactacattatctttcaagaatgtaaaaaaataaaaataaaacatctggagacactgtctttatagtctttcccttttgttttaagtttttattaaaaattgatgattcagtatttttctgtctgtaatgtcaaagaggaaagttgacaaacgaagatatttcacttagataaaccagaagatgaatggaaaaaaactgatgctaatactttacatgtgaatgattatggtgctattgattatataagcaataccactgactgttgtcttcagatacatcctagatgaatgtttccttccttccatccattcgtccttcctgttctttctttccacagggtcttgctctgtcacccaggctaaagtgcacaggtgctatcatggcttactgcagccttgacttccccagactcaggtgatcctcccacctcagcctcccaagtagctgaaactgcaggctgataacatcacacccagctattttttttttaatgtttttgtaaagatggggtctcgccatgttgcccaggctggtctcgaactcctgggctcaagcattcatcctgcctcagcctctgaaagtgctgaagttacaggcatgagccactgcgcccagccaggtgaattttctcaaacacagggagcaatgagtaacaatatagttcaaaaatacagttctcaggacaaaaagtaagtatagtattttcatacagttagttattcattaggaaagactgcattgctcggtattcaacactcaagtgttttgtggcaaaaacttcaatggctctgttttcttcaaagggtgtgtgacagtattctttcatcttttatgatttttggaacaccaaatttatttgacactgttcgtaagtggacagatacttaaggcaggtgtttgatagaggagattgtaaagaaagagatgatacagaaatgaagtaattcattggattgatcattgtaattgctgttagtctaaaaatgaaatatattgggcaattacgaagcagaaatttctgtcatcttttcaacatcattatgagctattaaaattatcaaaagtaacacattttgaattcttcaagtacaagaagaagacccaagagtccttttaaacacatacctgaaatctggaatcaatatttataaatatttccaggttcatccatgaacctgttgatgagctgtcagtttcaaagcgccttgtccttttcagatatatactccttcaaaaccaggaaaacagggaatgaagaattgaattacaatgttatgtttaaattcttatgaaaaaaaatcagtgaagttgttttgtgtcatttctttattcttattgtgtaaattattcatgaattaacttaaatattaataaaatgtcttttggacccagatgataaatgatgatgactgtttttcttggtgtactgagggttaaaatgaactaaaattgtaaaagagccaggtgtggtggttcacgcctgtaatcccagcactttgagaggctaaggcaggaggaccacttgaggctaagagttcaagatgagccttggcaacattgtgagatccccatctccacaggaaaaaaaaaaaaaaaaaatcagctctgcatggtggcacacacctgtattcccggctgcttgggagactgaggtgggagaatcccttgagtccaggaggctgaggctgcagtgagctgtgatctcaccactgcagtccagcctgggcaacagaatgagaacttgtctcaaaaaaaaaaaaaaaattatgcgagctgattttcacttaagacgataatactgaaatcaaaatttagtacttcttggtatcctgaatgttatactaaattttttgttaaaattaaccattttttcctcaaaattttatggaaccactctataaaaatgacagccaagttgaaacaaacatcactgagttagcttttattctattattgtgtaggttttacttttttctcgttgtatatatgcatttttagtgttcataaaagatgtttcttcactttgcatgtcatatctaccaacctaatgtttaaaggcaggctagtaatataatctacttagtttgtaaactaagtttttccttctggcacctcatgagagttgcagaattcatgatgcctttatttgttcttagtatttttcccttttttttttctttttctgtccctttagtatttttacttcctttggttcttctcatccgccataagccaaattctagaaaagttctgttttctttacttagaagttatttaacaagtatataccatacaagtaaagtctctcccttactgtgatgcaaatgtttaataactttaaatagacacatgcacaagctctaatgaaatcaccatcaaaattaagaaaataacaaaccagaggattcaatattttataaacaattccagtttcaaaatatacattaattgcaattctctgaagcaggggttcccaacccccaggccaagcctgttaggaactgggccacacagcaggcggtgagcagtgggccagcaagcattaccgcctgagctccgcctcctgtcacatcggtggcagcattagattctcatagaagtgcgaaccctagtgtaaactgcacatgtgagggatctaggttccccactgtttataagaatctaatgcctgatgatctgaggtggaacagtttcatcttgaaaccatctccaccccgctactccatgcaaaaattatcttccatgaaaccagtctctggtgccaaaaaggttggggactgctgctctaaagaaacctaattattaaatgtgtgttgacttttaggtattggtaactaaatatactcaagaatacacctggcaacattcttaagttatatttatataaaaccaggcaagagaactatatgttggaatttcatgaataatgtggttgtctttcactaaaagaaaatgagttaagctaatattgaataacttaaaataacattttaaccttaaaacgtctatttattaggtagtggtcatattttaccttaataccctaaatccataggtcccaacaagctgtactatttagtatcgtgcctcattttctttttttgctatatttctcaattatattctatactatagaaatgaaaaggcaaggattgggaaaggtgagaaggattgttagtgatttctccctctctagtttaagagatagaaaaggaagatatctaaagaaatttggctcactctgctccctgaagagctttcaatagaaggagctaagtgcgttcaggccttaaggggtgtaagaattcctgctttcctaggatagacacttcattttctgctagaacagtggtaggtgttgctgctgtgtcacctgaggcagcctctccacgtgaccacaatctttgatttacagatttatctcatttaaaaaacaggtctccataagaaaatcctttttctccactacttcatgtaattggtacgttttataggatttttttcaaagaaattaatgaaaaataactgccttgacttagaatattttggaagcaattattcatcttccttttaaatctattctaaatgtgttactggtccacttctctagaagaaagtgtgaaagcttagtgcatacacatagtgacttttatccatactatggtaaccacattttctgaactaaaaatgtttgttttatagttttcatttaaaaatcttaaaacaatctttggaagatttttcatatcacattttttaatttttttgtgcttggtgatataagagtcatgtgaaaatgtgaaaagaagtagcatgaggagaagatatttttattattagagatgttctagaaacttaaaggtggatgttcaccttgcctgtttctctagatgttgtctatcacatccctttttaaaaatgaacataattcaccaatcctaagacagatcttgaagcagattgggagttcagtaagaatatgttgtattgatttaaatgaaataaacaattgaatatttagaatgaccttctcctcgtgattccttcaagtgatgaactacagtgtgtggtttcaaatttgtgattcgaattattttagtatctcatctatatattttttgagagtgagagaatgtgtgtgtttgaatgtcaaattcccttccttcctactgggaatttggtcattgaataacttaatgtatcccaaggttcagttatctgttgactgtgttgcactgtagtaattataattagcacagtcctcagacccaaggagcttaataaaattatttgtatatgtcattttcgttcttgaagttaaaaattgttttcatatgtaagaaatgattttcaacctgagaaagctgattgccaaaaaatggattattaagagatgattattcttaatatctgtcatctactttctctgtgaagataggaaataaatggtagagaggtaaataaatggtaaaatacagtgttagagctcctttacaaggaaactgtgataattcctttttaaatcaacttccaaatctgctttgtaaattcagaaatgtgtaaattcagtctttttaaagcaatgaataatactttgcaaattatatcatgcacagtaaaaagtagaaagcaataacaggagtaatatgaactcaaagatgctccttatttcattcttattcttaaataaagtatgttttatggctgtttacaaaccagttttcaaatgactggtatgattttgactttcttgagtctacccaagagcaaaaaggttggcagtggtgtggagagaaatacagtggacttgcatatcccattaaatggttgttaaatgtcttaactagttgagaattaattgtatattagcagttgttatttttgttttgtttgttttgagatagagtgtcattctgtcacccaggctggagtgcagtggcacgatctcggctcactgcaacctctgcctaccaggttcaagcaattcttctgcctcagcctcctgagtagctgggactacaggcgcatgccaccatacccggctaatttttgtatttttactagagatggggtttcaccattttggtcaggttggtctcaaactcctgacctcaggcgatccacccacctcggcctcctaaattgctgggattacaggtgtgagccaccgtacctggccatattaagttttttgagagaattagaaaactgggtttcctcaactccaagatgttatcagttgtaaaatgtacccgtatgttttataccactaagaaagaaaaataagcctccaattaagcaacatgccatcaattgtaaaatataaccagaggggggagaaaagtagtgtttagctgggatacctccctactccctgaaaaacaagtcagggttttattagtaaatgaaaatgggagaatggatatttggtggcagtcatgataaccatttcatttctatatcattattaacctcttaaaatatccatcttaagtacattatggcaaagcttcttaaaatggtggcattggaatctcaagaaagtctcttctcatcctactccttacacagttgaaattaattgttgctgcctcctttctgtatctttttctttggctatcatttcttatccttttaatcaataaattcaacaatttgatacaatcagataattatttcctaaagtttgacttagagttaagcattgtacttaaaaagctacagggtagtctttcaattaaaatttatcttttaaattccatagggaccaaggtatttgttgatagcttcaggtctgataacttaaacaaaatgttctggcatcttgaaaaacaaactgcatggaatttattccagcttctcttccaaaggtgtcatggccccccttccttaggtcaattttgacacttacctatcaagttttcagaaatgcaatgagttcttgcttcttctgttgtgtatgtgttagtgataggaaattttttggtctcttcttagataataaatatcattggaatatttttcaaactgtgactaaaatgtctttggcattctccattgtactttttatatatgtttatgccctccctgtcttctgtatctgtaaggaatggacctgacattaagacttctccatagagcacatgagtaaggatttactaacgaactacattaaacccttgatagccctgaacaagcatctaaagaatcactcctctctgtctttaataagtcatggtaaaaagtatgggtaggtaagtttatgactgtattttaatgtttatgaatatgattaagatggtcacactttgaacagactcacaaaataatcttcaacttgttagtggtttcatttttttgaaaacggaaattctaaaaattacttatggaatgtctggtgtttgggggatgatgtcagaaatgaatctgttctgttggcctcaaccccacatcagactcatcagagtctgcatctcttttcctttttctgcacatctacttttgtttcttcctaagtgcccagtaatgtaaggaagcaagttctagttcccctgtagagctataaagctataaaggagactgaacattcacattactttgcagaaaggtgcttatgaaaattcagagacttggcggctttggaagatggctatgtaacattaaagtatgttctcttctctaatgatttgatcattttaacagtatgcattaacccacaggatttccagtagacattttcaattgaataggaacggcaataaaacaaattactaaagtgactataatccatttatatgtctattatttatatgtaatatatatatacatttacagatgctatattattttgcttgtaggtatcataacgtgattctagttctgcctccttaactattcttatttttattttttttagaacactgatatttgcatttaatggggaacaaaagatgaagaaggaaaaggaatatattcactaaggattctatctgcttactgctacagacctatgtgttaaggaattcttctcctcctccttgcgtagaagttgatcagcactgtggtcagactgcatttatcttgtcattgccagaagaaatcttggacagaatgtaacagtacgtctctctctgattgcgatggaaggtgataaactgatactcctttattaaagttacatcgcactcaccacagaaaaccattctttaaagtgaatagaaaccaagcccttgtgaacacttctattgaacatgactcatggagaagagcttggctctgatgtgcaccaggattctattgttttaacttacctagaaggattactaatgcatcaggcagcagggggatcaggtactgccgttgacaaaaagtctgctgggcataatgaagaggatcagaactttaacatttctggcagtgcatttcccacctgtcaaagtaatggtccagttctcaatacacatacatatcaggggtctggcatgctgcacctcaaaaaagccagactgttgcagtcttctgaggactggaatgcagcaaagcggaagaggctgtctgattctatcatgaatttaaacgtaaagaaggaagctttgctagctggcatggttgacagtgtgcctaaaggcaaacaggatagcacattactggcctctttgcttcagtcattcagctctaggctgcagactgttgctctgtcacaacaaatcaggcagagcctcaaggagcaaggatatgccctcagtcatgattctttaaaagtggagaaggatttaaggtgctatggtgttgcatcaagtcacttaaaaactttgttgaagaaaagtaaagttaaagatcaaaagcctgatacgaatcttcctgatgtgactaaaaacctcatcagagataggtttgcagagtctcctcatcatgttggacaaagtggaacaaaggtcatgagtgaaccgttgtcatgtgctgcaagattacaggctgttgcaagcatggtggaaaaaagggctagtcctgccacctcacctaaacctagtgttgcttgtagccagttagcattacttctgtcaagcgaagcccatttgcagcagtattctcgagaacacgctttaaaaacgcaaaatgcaaatcaagcagcaagtgaaagacttgctgctatggccagattgcaagaaaatggccagaaggatgttggcagttaccagctcccaaaaggaatgtcaagccatcttaatggtcaggcaagaacatcatcaagcaaactgatggctagcaaaagtagtgctacagtgtttcaaaatccaatgggtatcattccttcttcccctaaaaatgcaggttataagaactcactggaaagaaacaatataaaacaagctgctaacaatagtttgcttttacatcttcttaaaagccagactatacctaagccaatgaatggacacagtcacagtgagagaggaagcatttttgaggaaagtagtacacctacaactattgatgaatattcagataacaatcctagttttacagatgacagcagtggtgatgaaagttcttattccaactgtgttcccatagacttgtcttgcaaacaccgaactgaaaaatcagaatctgaccaacctgtttccctggataacttcactcaatccttgctaaacacttgggatccaaaagtcccagatgtagatatcaaagaagatcaagatacctcaaagaattctaagctaaactcacaccagaaagtaacacttcttcaattgctacttggccataagaatgaagaaaatgtagaaaaaaacaccagccctcagggagtacacaatgatgtgagcaagttcaatacacaaaattatgcaaggacttctgtgatagaaagccccagtacaaatcggactactccagtgagcactccacctttacttacatcaagcaaagcagggtctcccatcaatctctctcaacactctctggtcatcaaatggaattccccaccatatgtctgcagtactcagtctgaaaagctaacaaatactgcatctaaccactcaatggaccttacaaaaagcaaagacccaccaggagagaaaccagcccaaaatgaaggtgcacagaactctgcaacgtttagtgccagtaagctgttacaaaatttagcacaatgtggaatgcagtcatccatgtcagtggaagagcagagacccagcaaacagctgttaactggaaacacagataaaccgataggtatgattgatagattaaatagccctttgctctcaaataaaacaaatgcagttgaagaaaataaagcatttagtagtcaaccaacaggtcctgaaccagggctttctggttctgaaatagaaaatctgcttgaaagacgtactgtcctccagttgctcctggggaaccccaacaaagggaagagtgaaaaaaaagagaaaactcccttaagagatgaaagtactcaggaacactcagagagagctttaagtgaacaaatactgatggtgaaaataaaatctgagccttgtgatgacttacaaattcctaacacaaatgtgcacttgagccatgatgctaagagtgccccattcttgggtatggctcctgctgtgcagagaagcgcacctgccttaccagtgtccgaagactttaaatcggagcctgtttcacctcaggatttttctttctccaagaatggtctgctaagtcgattgctaagacaaaatcaagatagttacctggcagatgattcagacaggagtcacagaaataatgaaatggcacttctagaatcaaagaatctttgcatggtccctaagaaaaggaagctttatactgagccattagaaaatccatttaaaaagatgaaaaacaacattgttgatgctgcaaacaatcacagtgccccagaagtactgtatgggtccttgcttaaccaggaagagctgaaatttagcagaaatgatcttgaatttaaatatcctgctggtcatggctcagccagcgaaagtgaacacaggagttgggccagagagagcaaaagctttaatgttctgaaacagctgcttctctcagaaaactgtgtgcgagatttgtccccgcacagaagtaactctgtggctgacagtaaaaagaaaggacacaaaaataatgtgaccaacagcaaacctgaatttagcatttcttctttaaatggactgatgtacagttccactcagcccagcagttgcatggataacaggacattttcatacccaggtgtagtaaaaactcctgtgagtcctactttccctgagcacttgggctgtgcagggtctagaccagaatctgggcttttgaatgggtgttccatgcccagtgagaaaggacccattaagtgggttatcactgatgcggagaagaatgagtatgaaaaagactctccaagattgaccaaaaccaacccaatactatattacatgcttcaaaaaggaggcaattctgttaccagtcgagaaacacaagacaaggacatttggagggaggcttcatctgctgaaagtgtctcacaggtcacagccaaagaagagttacttcctactgcagaaacgaaagcttctttctttaatttaagaagcccttacaatagccatatgggaaataatgcttctcgcccacacagcgcaaatggagaagtttatggacttctgggaagcgtgctaacgataaagaaagaatcagaataaaatgtacctgccatccagttttggatctttttaaaactaatgagtatgaacttgagatctgtataaataagagcatgatttgaaaaaaagcatggtataattgaaacttttttcattttgaaaagtattggttactggtgatgttgaaatatgcatactaatttttgcttaacattagatgtcatgaggaaactactgaactagcaattggttgtttaacacttctgtatgcatcagataacaactgtgagtagcctatgaatgaaattcttttataaatattaggcataaattaaaatgtaaaactccattcatagtggattaatgcattttgctgcctttattagggtactttattttgcttttcagaagtcagcctacataacacatttttaaagtctaaactgttaaacaactctttaaaggataattatccaataaaaaaaaacctagtgctgattcacagcttattatccaattcaaaaataaattagaaaaatatatgcttacatttttcacttttgctaaaaagaaaaaaaaaaggtgtttatttttaactcttggaagaggttttgtggttcccaatgtgtctgtcccaccctgatccttttcaatatatatttctttaaaccttgtgctacttagtaaaaattgattacaattgagggaagtttgatagatcctttaaaaaaaaggcagatttccattttttgtattttaactactttactaaattaatactcctccttttacagaattagaaaagttaacatttatctttaggtggtttcctgaaaagttgaatatttaagaaattgtttttaacagaagcaaaatggcttttctttggacagttttcaccatctcttgtaaaagttaattctcaccattcctgtggtacctgcgagtgttatgaccaggattccttaaacctgaactcagaccacttgcattagaaccatctggagcacttgttttaaaatgcagattcataggcagcatctcagatctacagaacaagaatctctgctaagtggacctggaatcttccatctgcatcttaacatgctctctaggtgtttcttgtgtttgagaaccatgacttatgactttcctcagaacatgagactgtaaaacaaaaacaaaaaactatgtgatgcctctattttccccaatacagtcacacatcagctcaaaatttgcaatattgtagttcatatattaccgttatgtctttggaaatcgggttcagaacactttttatgacaaaaattgggtggaggggataactttcatatctggctcaacatctcaggaaaatctgtgattatttgtgtgttctaatgagtaacatctacttagttagccttagggatggaaaaacagggccacttaccaaactcaggtgattccaggatggtttggaaacttctcctgaatgcatccttaacctttattaaaaccattgtcctaagaacaatgccaacaaagcttacaacatttagtttaaacccaagaagggcactaaactcagattgactaaataaaaagtacaaagggcacatatacgtgacagaattgtacacaatcactccattggatcttttactttaaagtagtgatgaaaagtacatgttgatactgtcttagaagaaattaatatattagtgaagccacatggggtttcagttgcgaaacaggtctgtttttatgttcagtttgtacaatccacaattcattcaccagatattttgttcttaattgtgaaccaggttagcaaatgacctatcaaaaattattctataatcactactagttaggatattgatttaaaattgttctacttgaagtggtttctaagatttttatattaaaaataggtgtgatttcctaatatgatctaaaaccctaaatggttatttttcctcagaatgatttgtaaatagctactggaaatattatacagtaataggagtgggtattatgcaacatcatggagaagtgaaggcataggcttattctgacataaaattccactggccagttgaatatattctattccatgtccatactatgacaatcttattgtcaacactatataaataagcttttaaacaagtcatttttcttgatcgttgtggaaggtttggagccttagaggtatgtcagaaaaaatatgttggtattctcccttgggtagggggaaatgacctttttacaagagagtgaaatttaggtcagggaaaagaccaagggccagcattgctacttttgtgtgtgtgtgtgtgggttttgttttgtttttttggttggctggttgttttcgttgttgttaacaaaggaatgagaatatgtaatacttaaataaacatgaccacgaagaatgctgttctgatttactagagaatgttcccaatttgaatttagggtgattttaaagaacagtgagaaagggcatacatccacagattcactttgtttatgcatatgtagatacaaggatgcacatatacacattttcaaggactattttagatatctagacaatttcttctaataaagtcatttgtgaaagggtactacagcttattgacatcagtaaggtagcattcattacctgtttattctctgctgcatcttacagaagagtaaactggtgagagtatatattttatatatatatatatatatatatatataatatgtatatatatatatattgacttgttacatgaagatgttaaaatcggtttttaaaggtgatgtaaatagtgatttccttaatgaaaaatacatattttgtattgttctaatgcaacagaaaagccttttaatctctttggttcctgtatattccatgtataagtgtaaatataatcagacaggtttaaaagttgtgcatgtatgtatacagttgcaagtctggacaaatgtatagaataaaccttttatttaagttgtgattacctgctgcatgaaaagtgcatgggggaccctgtgcatctgtgcatttggcaaaatgtcttaacaaatcagatcagatgttcatcctaacatgacagtattccatttctggacatgacgtctgtggtttaagctttgtgaaagaatgtgctttgattcgaagggtcttaaagaatttttttaatcgtcaaccacttttaaacataaagaattcacacaactactttcatgaattttttaatcccattgcaaacattattccaagagtatcccagtattagcaatactggaatataggcacattaccattcatagtaagaattctggtgtttacacaaccaaatttgatgcgatctgctcagtaatataatttgccatttttattagaaatttaatttcttcatgtgatgtcatgaaactgtacatactgcagtgtgaatttttttgttttgttttttaatcttttagtgtttacttcctgcagtgaatttgaataaatgagaaaaaatgcattgtc

SEQ ID NO: 231 - DNA, 16492 bp, Homo sapiens
  source 1..16492: mol_type = genomic DNA; note = NC_000005.10:10249921-10266412 CCT5 [organism=Homo sapiens] [GeneID=22948] [chromosome=5]
aaaaaaaaaaaaaaccggaaatgggtcctaccatcttctcggagccggagtgcgaagaaataaagaaatagtgctttaagtcaatgaattcctccttgggacccactatcgagaaactatcagtggtaacgttttaaaaaatgacaaattcaatctgctcttgacttgtgtgtcctaagatttccactaagtgtcttcaaacctccccctccccggcttcctggataatagaagttcccgaaggccgccgattccagaagatactgtctggcgtgaaattagtctcagtagaaacataagtcccgcgcgtcttgtgctgcgcgtgcgcaagcttttgggccctcccgagaaagggaagtgcattctcgcttccgtagcggtctccgccggttggggggaagtaattccggttgttgcaccatggcgtccatggggaccctcgccttcgatgaatatgggcgccctttcctcatcatcaaggatcaggaccgcaagtcccgtcttatgggacttgaggccctcaaggtaatggcacagggacctgctcgcggtgggctaaggggaggtggccgaggccgtggctctgcgcctgcgcgagttgaggagcggctctgccatgtgctccccggaaaggtcgagaatctccgtctccctgcggtctccggccgctcagcccgcttactgagctcgggagacgccggcgcctaatcctgggctcggaatgtgggggccagccaggctgggccgccagcgcccttcggagctgggtggggccgctcagtccggtcgcccgcgggagcaaagcgggaccgcctccccgcccggctcctccagcctgacggccgcgtgggactgcgctccagtgggagggcgccggggagatgctctgtcacctgtcggttaaggcgctgctgcttaacctttcgctggtccacccgcaacggcccttccgttttctttgtcactcgtaaaggtgtggtcacttaacagggtatttcatttctgagtgcttttttgcccacccttgaggaaaaatagcgaagagtgaaaaacggacgcacataaccgtaatacaaggtggtgtgcagtgagaaggacagctacggagagggtgcacataagcgtggtgctggaggacagctttagatcggggtgagaggtagcattctagggagaggaaacggtagaagtaaaggcttgggcaagaatgcgcatggcacgttgtagaatggaagagccatccggttttaatggagcactgacttctttaacttacaatagttcccgaaggtggaagctattgaatgcccaacatggaaaatacgacgttatctttggggaagaaggggagccattgagggggttttgagcagaatttcagtagagctgcacttcaggcagcaaagcttgagatagaccgaagggaataaggaagaccagaggggttaaagaaaccagggcaggggtgcaggtaagaaacatctgagcaccagacgttgacagaaaatgcagaggaagggacactccgagagggccttcagggtttgttataaagtgaattcataatagaccattccactaggtctctcaggtgtccctgttcacttagtgtcttggaggtttacttacgcaaagttagaaacaatacagttcccctatggactctttgtttgacttagtgctagttacacaacctcgcggaacctccttttccagggggaggtgataggcctccgtcaagctgaagacttgacagtgatattaaatggagtgacttagaggggctgcacagtggttgatccacggtaggcactcagtatttgtttcctttctagaaagaaaaagtttcaagctaattgtattatgtattccattttattttccacttaacagggacctgcagagaaaataacatccaatacacacacctggtgtaacaacataactaaaactaggttgttttgcatcagccattttgttcaaactgcatgcatttgtgcccagaagtcgcacactctgagacagggttattttacaaaactggggacttgggcccagagcagttgagaaattgttctgaagagcagttgctactaaagagcattaccatggtcagggccaccgctgtcagagtcaaagccagtggtctagagcagcattctcaagtttggcatattgacattcgaggtcggatcattctttgctgtgggagctcatttggacagtaacctgggtgtttaagtctcttaaaagagttggatgctgttggtaggcatcctgtgagtgttgaggctcagcagtttagggatatacacttgctccctgacctcatagaacgtccagctaacttgaagaaccaaaatatatggaaattgaaggcaacggtaaaagaaatgtataggccaggacgtgaacgttttaatggtaatggtcacagttctttctctctggtcatttagagccttaaaggtaatatgtattttgttgagattcttcacttgtttaacacttaactgtataatatttcaccttaaaaatgcaggcattgactgggcgcggtggctcacgcctgtaatcccagaactttgggaggctgaggcaggagaatcgctggaacctgggaggcagaggttgcggtgagccgagatcacgccactgcactccagcctgggtgacagagtgagactccgtctcaaaaaaaaaaaaaaaaaggtgcaggcattagttggcttaggaaggaatcatattctaaaatcctgtaacctaaaacagagcaggctaagtttccaggccagccagcataattctgttttatccataatatgtattatgccttgatgtttgatactcttccctctggaaacacacagaactagcagaaggaagaaaaaggttttttccacgttgccgagcagtagggcaaaatagatctcgggatttcgggatctctcctatttgccaaattctttacatccttttctttctgcctcttgctttctccttaaaaataataataataataattctattactcaatttggtagctaaatgtgaaaaaaaaaacaggtaacttttttattatcactttgacagctacttaccttccttaagagggccagtttcagccgggcgtggttgctcaaacctgtaatcctggcactttgggcagccaaggcaggtggatcacctgaggtcaggagttaaagaccagcctggccaacatggcaaaaccctatctctactgaaaatacaaaaaaaaatgagcagggcgtcatggcgcgtgcctgtaatcccagctactggggggctgaggcaggaggatcgcttaaacccgggaggcggaggttgcagtgagctgagatcatgccactgcactccagcctttttgagacacagcaagactgtctcaaaaaaaaaaaggccagtcagtaactttgatctataaatataattattgggatttcaggtgggtggaggaagatttttaaagcaagagcagtttttctttttattttgtaatggggtctcgccatgtttcccaggctgatctcaaactcctggcctcaagcaatcctcctgcctcagcctcccaagtagggggggttgcaggctctagtactgcatccagctcaaaagattacaattctgcagtaaatcatagtgtgacagtaaggtgttgtatgtttacagttggactgtttctcatgagtacaggcccctccttgtctgcagatggggaacccgcagatgtacaagcctagatgcaagggacttgagcatctgtgaatttgggtatcctcgggggctcctggaacctgttccccatggatgctcagggagaactgtggctcctggaaccaattccccatggatgctcagggaggactgtgttgcacagtggtcttgcaacgcctgtaaggtcatagtcatactgtccctcttctcagctgtaaatgggctggtaaaagaatctgtctcattaatgtgttgaaaattcagtgagataacacaaagcacttggttctctttctttacgtaagaattgcttattaaaactggagtcgtaaatgttataatacttaaacctgtctgttgccccttaaatgtagaagcttctagacaatagaaactaagtcataagtgatttttgtagtcatcagatgtgtgcttttaaccattgaaattatatgtaacagtgtttgctttttctgtttgtttcattagtctcatataatggcagcaaaggctgtagcaaatacaatgagaacatcacttggaccaaatggtaagagtccaccattccgtgttttttagcaaaagatttaaattataaaactgtcaatataaacctctctacagaaaggtggagtattgaggggaggcatcttacttccttaacacagccaaaattttttagtgtatttcaggtttcttaaacatggttataatcgtgtgcaatattaggtcggacctttttttttttttttttagcatgtaacatcatttcattagcattttccaaatcatagttgtcttttgagattaacattatacttaatgatgctccataatgttttgccaattatgttagccaatctaaaaatgccttcatgcagctactattttgtgtatgttgcattatttgtatataataaattgcacagataagagctgggtcaggaggtcttgttttatagtttgtgatattggttgccagttttttgcgcaaagcctactaaacgttgttttttagggcttgataagatgatggtggataaggatggagatgtgactgtaactaatgatggggccaccatcttaagcatgatggatgttgatcatcagattgccaagctgatggtggaactgtccaagtctcaggatgatgaaattggagatggaaccacaggagtggttggtaagaaaagacaaaacatcctttctcatttaagagacgtcatttaagaccacagggctaacatgcctgctgagattgttgtctctgaatcagagcatgaggagacagacaaatccaagttgaaaacatgctacaaaacaaatgtcggactttcaaaactgacagtgttacaaaagaacagaaagagggctggggattgttaggcatggagaaatgtgtaatgattgattggacactgattttgcttgtcttttaagctataaaggatgtttgggaaacgtggaagaatttgattttggatcatgtactgcaatgctgagtttcctgagtgatctgtgaccattatattgcagatgtgtaggagaatgcccttcttctcagctgtatacctaaatacttaggagtgacatgtcatggtttctgtaactaattctcaaatagttgaacagaaacagtatgtacatgtagagaaaatgtggcaaaatgttaataagtaaactggtattcgttttagtattgtaccttttttttctgaagatttgaaatctttaaaaagttggggagattgaagacaaaatatcagtaaggttaccttttctgcagatgaaatttgaattcattcaacaaatatttattggatactattgtatgccaagcactgttctcggtgcgcttggagagctgtagatttaaacaaaattcatctttgcgaccctaaaatgaggagaaaggaggatgggggtggggggaataaataataaacacgttttagtctcatcaccaggctgaatttcactgagtagaccctggcccaggaaacataatagctttttacctcttagaaaaatgttctttttacattatattctttagttacgttcttcacatcactgagggttgaatgttcatctgtaaggggacacatgtcctattcgaccttcgctagaactaaaacgaggctttcttttaaaaatagagggcttctgcctctaagatgacttgcagcttaattctagaagctgcttctttccatgatagcatctaacttgtgctgattatactaaaagtgaagttttgttgtttgcctgaactgattgtctgctggcttatttgcagtcctggctggtgccttgttagaagaagcggagcaattgctagaccgaggcattcacccaatcagaatagccgatggctatgagcaggctgctcgtgttgctattgaacacctggacaagatcagcgatagcgtccttgttgacataaaggacaccgaacccctgattcagacagcaaaaaccacgctgggctccaaagtgtacgtttcagtagatgatatgattacccatttgtagaggaggcagtttgtttgccatttcttaaaggcaacacaaaatgaccactggtggatttgtatcgatttgattatttgttttgattacttggttttgctttgtttttaatgtagatgtagacagatgcattttgtatttaagttgagaactgaatttctaagttcaggtataaatccccttgacaatatttgcaaaatatagttattttaatttagcagaataggttgtgttaaaaatcagctaaggctggatgcagtggctcatacttgtaatctcagcactttaggaggccaaagcagtagcttgcttgagctcaggaattgaagaccagccagggcaatgtagtgggaccccatcgctacaaaacaaaaaactagccaggcatggtagcacacacttcagcaactccagaggctgaggtgagaggtcgaggctgcagcaagccatgatcatgccactgcactccagcttgagcaacagagcgagaccctgtctcaaaaaaaaaaaaaagtcaactagaaagggtcctacctggaggatatgtgaattttcttaacacttctttctataatttctttgctggggagccattgggggtgggttccactttttattcagcaaattgccgatccaaaattataatttagtaaagagagtcttgaaagcgacttgtctctggtgttttcagcgttcgtgtaatgtccgtttgccaggcttactgccaggtcttatgggcactaagacacagctcttctcccaggagactctaagcaacctcagccaaggggtgcgctgattatgtacaatgccaaagacttaaggtctgttgccgtaatataacataaaaatccagtgtaagctgctttattacattatattaaatcagtgagagatgttttcaattgtgtgcttgtggtggttttagcaaaaaggaatgagggatcttctaaactcagagtagtcagggaaaatgcaggaaaagtgtctgcttctgttgccttttcccctgagcaaagcctatgttagagcagaagccttcagcaatgcctgctgtcctcctctaaccacagatctcagcagagactagctccctaggcaagagtgagtaccctaggggtagcctcttgtcacaagtataacacttattttctcatgaaaggaggacatcatcattacttgaagtgtacaaatcagttttcttgttgctttataagttggccttgttctgtttgcaagtattaagtcatctacttaagatacaacatgtttactttcatggttctcttttatagataacctgtgatttcagacattatttcaagtgctaggtttccctagttgtttttcttggctcaaaaattaatttattgaactgtctattcacatgtttcaaagctttcaaaaaggtaacaccctccatctataatggatgttgtggtgaattcttggaaagtttaaatgccctgtccagtcctttcagttcctggttagtgctacacttcattgagataagagtgactcttcctgagtgattacttacctttcccattctgttctgaacttgtaaaatagtaacagtattctgtaaaagtgctgcattctaagaagaccttaattcatgccagactacagtggtttcttgagtacattcataatggaaggaaatagtaaatttcagagttagcgaaaataaagatgtaattttttcctatctaagtatacagtcccctttagggcccatggatcacaggttaagaatctgccccagactgttgaaaatgcaggttgagatggcattcccctctagaagactcaaaacatcgtttgatttatatctttgagtaacattgtgttatgtggcctgctttggttgcagtaattgtgaaaccaatgaagtttgttttgtggtgttttcctcagggtcaacagttgtcaccgacagatggctgagattgctgtgaatgccgtcctcactgtagcagatatggagcggagagacgttgactttgagcttatcaaagtagaaggcaaagtgggcggcaggctggaggacactaaactgattaagggcgtgattgtggacaaggatttcagtcacccacagatgccaaaagtgagccattgcatctcacagcttcgcactgttggttaactcttaattccaccaattaaaatgtctttatgttcccccatagaaagtggaagatgcgaagattgcaattctcacatgtccatttgaaccacccaaaccaaaaacaaagcataagctggatgtgacctctgtcgaagattataaagcccttcagaaatacgaaaaggagaaatttgaagagatgattcaacaagtaagtcttaccagagtcctcagtggaatttaaactcccaaagggtacagttagttaggtttggttagtaaatatgtgtagtctttcttcagttctaaaacatacacaggaaaaaaccaaattgcatagaaaggcataaacagggaagaattctaattttgtcttaaaatggtagcgtgttcaggccaggtgcagtggccatgcctataatcccagcactttgggaggctaaggcaggcagatcgtgagatcatcgagaccatctgactaacacggtgaaacgccatttctactaaaaacacaaaaaattagccaggcatggtggcaggcacctatagtcctagctactcaggaggctgagacaggagaatcgcttgaacccaggaggcagaggttgcagtgagctgagcttgcaccactacactccagcctgggcgacagagcaagactctgtctcaaaaaaaatggtagtgtgttcagggtcctgaaagaagtgaccctgttacctaaagccgtgctttcaattgtacatattatatttgccgtcctggacaaatttaacttagcttaccttgcctttaagatttctgactataccttttaggcaagagttaatgagtaactggagttaaaccagaatgcactcatagtaatcccagttctttgctcagttaagtctagtttgggttcatgaataccttagcgtaggtgtgctttctctctgacatagcaactcctctttgggggctgcgtccttgggagttgaaaacaccagtactcaagaagacaggaacgtgggttggttagggtattatttatcatagcaaaccaactagagactattttcatgtctgttcttgggaaagttgttgaatgtactcattgatgatacggttcttggtgcctacgacataccaggctctgttgtaggcactaaaggtacagcagggaatgaagccaagctcgtgctcttgagacacagataagagaaaggtgggtacagctccattacagacactggtcagagaggtgacctgtaaggagaggccaacatagggtgagagcagtgcccctgggggaggagcattccaggctgaggacagatggggatgctcctgagccaggaacattgttggcttgtacaaggaagagccagcctcagggattgaagcatgctggcgggagcttataaataaaaggccatcatctgggccggtgggacagttttcatgagaatggtgcctcagctgtgctggggggccacagataaattgagaggccagggatgttactggatcgtgctggtgaggcgcaggttgctgagaatgagaagggaatgacgatggggctagatagtaaaatgttaaagaatgagaggcagggacccaaagaggaacactgcaggtgactgaggagcaagaaggaccctctcctgttctgagcatgtgagagggaaagcagctgccatctgaggagggttgcaggggcaggttggttttccggggttgtgacggagagattgtataaggaggctgctgttctggactgagttccagagggtcagggaaggaagagagggagagccaggcagtagcaggtagcctgggaggcctgatggagacaggtaagccagagttgtggggcacggtgtggcagtcccaggtgagcaccagaggtggggtgggcagcctgatcgttgccctcctaattgggaaaagtgactttgccatttgcaggtcggggtgagggtgcttcttactggaagcagggttgcctctgtgagtgcccgaattagtttatggatccactgaggattgtccactcaggtgagacagtcaagttgcaagtggttcataacattgtttgtttaaaacatactcaggtgaaactactctgtaggtgtttgtgacaggacagagctgttagccatttccccatggttggggaagggtgttagctttgttgacgtttctgtgggttttgcctcactgtaacaatagggttcagcagaattactgcttgtggtttttaaagcataaacaatgaggtgatccccattgataaaatattcactatttagaatttggaactgacagaaaagtggacacttgtctatttccttccttctctttcctttgcttttgtgtttgagtgcacctgccttacacccaactgtgcctctccttttttcaaacattgtaatgaagaataaatacccactttctcttaatacgattgtggtggttcttttcccagattaaagagactggtgctaacctagcaatttgtcagtggggctttgatgatgaagcaaatcacttacttcttcagaacaacttgcctgcggttcgctgggtaggaggacctgaaattgaggtaggatgttccacgtgaagagactttgagaagtaggggttcatcttatgtgttgaggggtgttttgatagccctgccttaaataactgcatcacaccaaggctggcagatgaggggagggtgagctgggagagaggaaagcgctggaatctttgttactgtttggataacagtgctgtgtgtttctggtgttccctggcattttgaaattctctccctgtgttgtctcacttggccctgtcgttgacttactaaggctggaagacctggtctcatccaaatactaatggcagtcccaggcaacggtgcctcggtggttctcactgcagcgcagtgcaaggaacatgcaggctgggttcccagagtgagggagggctgcacagatgggagatgagggtatgagcttaggggacgggcgccgggtgatagatctgggcagcaccaaagccccaatcaagacgtccagctcaagagccttgttacctagcaaggtgctttgggttgaactggagatgtctcggtcaaagtggggcagcagttctagtgaacaagttggtcttagatcaagttttgctcatttgtggcccagttttgaaagttaacttcaccagtactgtcttcatccttctccctgaccaccccaattagctgattgccatcgcaacaggagggcggatcgtccccaggttctcagagctcacagccgagaagctgggctttgctggtcttgtacaggagatctcatttgggacaactaaggataaaatgctggtcatcgagcagtgtaagaactccagagctgtaaccatttttattagaggaggaaataagatggtgagaattcaactatttgtcctatactgttgcttattttgcttcatggtctggcttttttgcctgtgtgtatttaacagagacacagtcaccataagaaaaataatcgtggttctcaaacaatgacgtatcatggtgtaaaattactgaagaccatgttaaattgttaatttcacaaggcacatttgcctttctgctgtcccttagagtatacaatatacactatgagatttttatatctttttaaatacttaaacacagtttaaatattcaagtcctggattttagaatgtttgatacagttacattaggggttggttaaactgctagccctagcaacataagactcattttaattacaatatggtattattaccaaggatgacttacatctgtcccttaggtagaaaaagggaacccaagtgaataaccattgacgatctctgttctttgagaatgagtttttagcacattgtgataaatctttgcgagttttgtcagtttttgactcttgcttgaccgtgtatcctagaatgagtcactggccgcctctgcctcttgaattttgttaactacattgcaggaaggaaagctagaaagataaatattatccgatagtggaggccatctaaatattagagcacagcctctctgtctttaaaaaggtgccagatacttggctctaaattgactagatcttgatcacattaattcaggcaaagctgttttccttagatcattgaggaggcgaaacgatcccttcacgatgctttgtgtgtcatccggaacctcatccgcgataatcgtgtggtgtatggaggaggggctgctgagatatcctgtgccctggcagttagccaagaggcggataaggtaagggatctgtgcagacttagtgaaagattcaggcctcgctgatggtggagactgtgaagctgcggaacagcgaggtgctggatgcaaaacaagcatcgtgagctgtgtgtaggtgacaggtgttttaatctaagttaattcccacgttcctgtattcagattctggttaccataacctagcatttctcagctgttttcagccagttcgtccttgaaataataaatctatagtcttttaatgttatttgaaattcaaaattaatattataacttaaaaataaagccataagagctgctgtattttgagacatctctcacatgtatgtataccctctgcctgtattctgtggtgacattataatattctgatagatacaaaaataaagacagcctgttcttacaattctttgtgagctgacttttcaaagtatgtgatacagttgtgttttcacggtgccgctgggttgttttgtttcgccaagtgcactcaccatacttctgtacctttccagtgccccaccttagaacagtatgccatgagagcgtttgccgacgcactggaggtcatccccatggccctctctgaaaacagtggcatgaatcccatccagactatgaccgaagtccgagccagacaggtgaaggagatgaaccctgctcttggcatcgactgtttgcacaaggggacaaatggtgaggagctgtcacgcctctgcgtggagggggggggatgtctgatttaaactgaataatcatccactgtatgtgctgtgagatgatggtgtctttttaaatatgtaagcccacttcaggtgttcaagtcctgaattttagaatgtttgattgccgtaggaattggttagactactagacctagcaacatgagactcattgtaataacagtaaagtgcatatggtactatcaccaaagatgacttaggttttaatctctggtttttgggaagtaatgccttattgctgtttttacacagatgtctgtcagtgggcagcatatatataacagctctgaagtgggctttagttcacagttcactgtgtggttaatcctgcacactgtggagtgttttctaaatgtaatatataacctctgtagccacttgtgtagctcggctcccaaaaagatatggtggctgtagcttgttgaaacagtggtctcaggcatttctgtactaaatcaggccatgtctgtaatccatccacagaatgacagcttttgcttaaaggtataggtacattctgctttccatgctcaaattccaagggtttcaatagtagcaactctttgtgaggcaaacatttaatgtttctaacttgaatgcctggttgtgctcaaatttagcatttctagggccgggcgcagtgactcatgtctgtaatcccagcactttaggaggccaagccgggtggatcacctgaggtcaggagtttgacaccagcctgaccaacatggtgaaacaccatctctacaaaaaatacaaaattagccaggcctggtcagggcaggcacctgtaatcccagctactcgggaggctgaggcaggagaatcgcttgaacccgggacgcagaggttccagtgagctgagatcgcactgttgtattccagcctgggtgacacctgtctccaaaaaaaaaattagcatttctagatctttcttggaaatatcttacatttcagctgtggtcagatggacttactttagatttcctaagttagggtatggatactttgtgggataagatgttcctgaaaaatgtcaccctgtagctagtcattgaagacagtgccctcccaacagctctctttaccaggtgcgagttccagagtgtccttggaagtaatgaaattacattcatctgaaaatgaaatataactgaaattagtggcttcctgcttggcttccaggagtttgtatttcttaagtcttactgtgattccctaaatcagaaagagttggttattgatagtttattgtatgctattttaggataatcagtgtccttgtatttttcagatatgaagcaacagcatgtcatagaaaccttgattggcaaaaagcaacagatatctcttgcaacacaaatggttagaatgattttgaagattgatgacattcgtaagcctggagaatctgaagaatgaagacattgagaaaactatgtagcaagatccacttctgtgattaagtaaatggatgtctcgtgatgcatctacagttatttattgttacatccttttccagacactgtagatgctataataaaaatagctgtttggtaaccatagtttcacttgttcaaagctgtgtaatcgtgggggtaccatctcaactgcttttgtattcattgtattaaaagaatctgtttaaacaacctttatcttctcttcgggtttaagaaacgtttattgtaacagtaattaaatgctgccttaattgaaggggtttgggtggatttttttttctcaaaataagctgtagggactattttaacagcttaaacaggagctctcaagatgcactttcatattgagaggaatatgggcttgatcctcttcctatctaaatgggtgggccatttgattgtagagggtccaccacagaattatgggatgccttaagtgctgttactaggttgctcacagcctaacctggcgtgttgtttagggctgatggagacccatgtgagcctttgctttcctctggccccggccccaccctgaacacagctcatacacagaatcaggaccagcatgtgcagagctggccaccagcacaggcttagggcagttcagaacccacttgtttccctatcagagggacacagtgaagtggaggttaaagtaaattacaggaaataagggagaaatcttgcagttaccatgttcagatagagtgactgaaattaattgtacttactaaagtattaactagctaacagtgatgggccaagacgctccgagaactctaccgggattgtctgttctgacaacccagtgaggcagatacactttcttactgctcacatcttacaggtgagtactcataattggccagcatctcaccaccagcaagtagtagggccaggtcaatcccaggcagtctgaccccagagtggcccagctcatcccctactctgttatttgcttgttaatgattctctagattttctaaaataatgtttcttagcattgtgatgataaagctcatgatgaactttatcactagttatgccaccttaactagtcagatttcctagaattaggaaatggtgactcttgtctaaatttggttaagtgatgaatttgggttaccgtctcatgtgaacctggagattcaccagtcttaacttttgggtcattgtgttttctctacattcatgcattggatgttttgctaaataactcctgtggatttaggaatgtgtgctaatagcaatcttcctaattttcatgtttatatggaactatgcagttgagtattgaaagctttaaactgagtttatttacaaggactgagtctagcctacagagaacatacagcagccttctttggaccacagtcttatccgaggggtctgtggttgtatcagaagagccactaaaccaatccccctttccaaaattgaacctcacagacgttcctgttttttgtgattgagaaactggtcaatgaacaggaagacttagagatgtttcacaagcctttgatttttgtttcatttatttgtaataaacctcttccacgtgatgtcttttatttttcacgttcca

SEQ ID NO: 232 - DNA, 159241 bp, Homo sapiens
  source 1..159241: mol_type = genomic DNA; note = NC_000015.10:100919017-101078257 LRRK1 [organism=Homo sapiens] [GeneID=79705] [chromosome=15]
gctgcccctggagcagagggatagcgaaagcggggctgagcgcagcacggaccgatcccatcgccgcgctcgccccgcgtggaggcagccgggtgcccgaacctgaaggaggacccggtgccggaagggcccgcggaccccggcgtctcccggggcatcgagcgccatcgcccgcgttttacggccagggaaactgaggcggccgccgaggggacgcctcgcgacggttcctgggagagctggcggcggccttgctctgcgcgctcttcgcgccgccctccccgcccgcccgcctcaggattgaggaagtgcgtctgggcccggccccggcgcggggggcagacggcggtgggacggccaggccccggccccgccagtgtgtccgcccggccccgcgtcccggagcgcccgcacccggccccgccgccgcctcaggtaagcgccgctcctgccggcgccccccggcggcctggctgcctcccggccccgcccggggaacccagagcccgcgcccggcgcccgcggggagcctcggcctctgcctgcccgcgggcccctgcgctccgggcggccgcgtggtcgggcacggggggccgttgcgcaggggccgcggcccgaggggcgcggagggcgtgtggggcgaccccggtctcacgtccccgctgcctcccgccgcgcccggagcccagccagcctgtgggaggggagcgcgcggggcccgagcagggaaccccgaaaccccgtccgggcagggtcgggaaagctgggaagcggaggcaagagacacgagtcgggagacacgagccggggagcccataggtttcctctgcctttggagcgaacccagtcccttagcggggagcgggcggagtgtgagcgcgcgggtgagcccgtgccggggtgtcggcaagagaccgcccgggagcctctcgctggtccggggcttcctggggttgcggggcggcccagcgaggcttcaccctcctcgatgtctgggtcacgcttcttgcccaggtggtctctggctggcgcagatacaactgctctgtctaccatggtctctgcaagctacaggggaccttcctggcaggcagggacgcgggaaggaagcctaggaaggccggggtcagcgaggagacgctggtggagaatctgagaacccccgtggccatctcaacctaccccttcacagtatgaggccgcgaagtttttctcccacgaacacttcccctgcaacaggtagagaaacgggggcatatagctttcagcaaacctctcaccgtgtacactaatgatagagtttgccagccactcacagggtatcaaaatgcccagacattaaagggatagctagaacatgcacaattttggaaaatgttaacattaaacgccttttatgatttgattctcttcatctttgcctatgtcctgaaagagaaaataatataacaaactaacctcacacctaatttgttcctaaaggaggttttgcggtcagccaaacctttccctctcccaaaagtcgatgtctctggcagtgacctcgcagtcaactcggatcctcagataaaaaacattcagtctgttgaatctatgtctaaaatgtgtcctgatctgtcccctttttcttatgcccccaccccccaccctgccccttgtccagggtaccagcatctctttactgtaggatttcagttcccccttcctccattctctatatagcagcgtgcgtctgtgtgtgtctgtgtgtttaaatgggtaaatcagaccatatcagtcctctttatggagtccttcagtagcttctccttgcaactggcacgcaatccaggagacctccttctcctcacacccccagctgatccagcctctgctgtctcggaccaccaggccattgccccaggccacactggctgagcttgctgtccagcactggtcccctgcactgctgcctcctgactcttcacacagcctcagaaagtcttccctggtcaccctctgaaaacccacgctccctctcacatccctcactctgcagcctccctgcagtccccattctgtactccttctttatctgtttaatttctccttaattatcttgtggtctccactggagctcttggggtcagagactgatctgtcttgcttattgctgtgccctcattcccataactgtacagggagataccccgtgcatggtggtagagtgactggatggggaatggacaaccctaacttacctgtggtttcagactcatggagcatttctctcctccaccctttttgggctcatctgggattgagaacaacatatttctctggcctgcagctccaagatatttggatgcccccaaacccattaaacacattttataggcaaaagccaatgctagtaagggatgcaaatagcactcaagagatttctagaatcatgggctaaccattttgaccaggattttgtttcaaaaaggaactaggtgatatgaatgagcatgtctagcatgctttgcttgcaagggacttctaacttctaactgatatcgacagtccttcccaagcctcctaaaatatctgggcttctctgctgtcagaagctttatagcaattacttagctgtctgctcccccaccagcttcacaaactcatgaagttccctcttcatagaaagaactcaataagacatttgtagaatgaatgacaggttcttctcttttcttttctctagagtcttgctctgtcacccaggttggagtgcagtggtgcaatcttggctcactgcaacctccacctcccccagtttaagtgattctcatgcctcggcctcccaagtagctgggattacaggcgcccaccagcatgcccagctaatttttgtaattttagtagagatgggtttttaccatattggccagggtgatctcgaactcctgacctcaagtgatccactctcctcggcctcccaaagagctgggattacaagcgtgaaccaccgcacccatctattttcttttccattaaatgtttaggtttattcattaatgcaggtataaatagttggcaaaaggaaattgatgaggttttgaaaaatcatttaaaccatcattactgctgaaaacctcttgatgccctctttagggtgtataatgaagacatgtaacttgtaatcatcacttgttggcacctctctggacccaaaagaagcaggaggaagcaaagatccgtttgagggcaaagattgagcaaaatttgaattacctcatcttaaaacttctaccttagaatataagccaaaatagtaactagaattttaaaactgctccaggggcagagtcttccactggtaaagtgattttcaaaaggaaactgaaaatgaaaaggggaacaaaatgtgctgggtgagggttagcctgaaataattttaagatttttttttttttagaacttaaaaacattgtatggtaagacacttctgttttcaggaagaatgtctagcgtttggatttttgaaatgctgttggttatgtgcggtagctgttttggagaggtgtctgaaagcagatggcaactgtgcttctcagtttctggatgtgaatgtgtgatcggaacgtttattttaaaacagattctgtcttgctggctcttcctctctctgtcacaagttgattttccaaatcaggttttgctatttataaggctttcatcatcccctaaattttgcccagattgatcgtttttcctttcctccttcgacttttcaggcttcccaacttcaaacacaggtgtttcccacacgtggtttgtgtcgaccatcccttttgcctctgaaacatgtgcagcttgcacaaggctgctggagcctggcttttctagctccacctttccctgccttgacgagtccagtccacctgggccaggtgcctgagttctaggcttttaggtgagaaattcccacagccttgtcctgtaccttacttcgtgcccctactgctcacggcatcttctagaacctacccgctggtgaggctggcatctgccctccagcattgatattctgatcttattaattagcagggaagtgggagacccgctggcctccaagtctgtgcgctggtactacaggtaatgaccaccccagccctgtcgtagagagaggctgcagaaacttcactttggttgaattcacacagtaaccccactagcaggcccgggcataagggtggatgtctatttttaacaggtgaaaactgagacacacatacctttcagctgggagtcacactgcgaacatgtgacacaggcagtccacacctttaacgtccacgctatgcttttgcctgtacagattctcttaggcattatttttatataaccttgatttaaaaaatatatttttggctgcactatcactccccatttcagagttgtctatctgagagaacacagacaagaggtgctaattacctcgtacttcatcacatgtaggatatgctataagaacaaggataggcgcacatgcattacttatggtagtacctcatgtcaggcctgagctaggcatgggtcttaccctccctctggtccttcaatcaccataccaggatgggcacttatgcccatggggggactctaagctcagtgggggcccagcatagaagagcagcacttggtctcagtttatcatagtcattagtttcagagattagtctaactccaccctggaacttttggggccagataattctttgttgcaaatagcagtcctgtacattgtaggatgtttagcagcatcattgacctctacccattagaggcctgtagcactctcccccagccaagttgtggcaaccaaaaatgtctccagacattgccaaatgtcccctgggaaaggggcagaatttttgaggctcatgtctgctaacctccgtcatttagctttctgctaaagctcatgctaacttgacttcataaccagtaataattccatgtctttggaactgttgcctgaccacccccttgggatgacgtgctcacctctggcttccagaagaactggccccgggcaaaaggagagccttgtatcgtgactaaccttaactatgtctgccctacccccactggagtgtgcccctgagggcaagagcctccttgagccatcttggtgccactgagcctcacacagagcctggctaccttgcatgtgacagtaggtgtgcgttgactgaacaatgattgaagctgttaccagtatgtgttttccaattgtctggggtttgtttgagactcttctcaggtagacaatacctgagccccgcatcaagatgggatggggggagctgtgccttcccactgaccacacctgatgggtttggctggatagatggactacaaaaaggaatgttgcagagggaaaactaaatgaacccatgcaaatatttgcaggggaggaggacaggaattataaaggctttctgttttgattgtttttcgccaccagagcaagaaagctttctgctcagccatggctacgagtccacgccttaatgcaccccacagccagcggcagtggcagtgacaacagcgggacctgcctttgaagatcggctgctgcaagggttgatggctggcatgtcgcaaagaccccccagcatgtactggtgtgtggggccggaggagtcagctgtgtgtccagaacgtgccatggagacgcttaacggtaaggacagggctgtgcttatgcctgcctgggtgtgacctgccatgctcatcctgcagggtgtctaggctatgtaagaacaaggagttctcaaccagtggaaatcaaatgtccatcatttggtgctctttcatcatataatatatcttgggactcttaaattctaaaaattgaggaacagtgtacaaaatttattgtggactcacagatcttaacaattgggacatcacttcatgctgggttaaagaacttttaagaaaaaggatgtagttttgttttttcattataaaaataatacatgtttattaaggaaaaattgaaaaaaataatttaaaaaaaaggaagaagggaaaggaatcatccagaatcccgctatctcaaacacaagtacaatgagcatcttggcatgttctctcctagtctctgcttctctgtgtttaggggactttgttttaaccttattgtacttacaaggtgtatgtaatgttgcatgttgcttttttctcttcaccgtccatcagtgacatttgcttagggcaccacctggctcccgcaatcaagtgaaacatcatttcatttattttattttatttttttacgatttaataattggatcaaaaaatgattcataaattgggcagtactccgaaccaaaacaaacatcattatctgcgggagtgctatgtgcagttattgacctaatccttattctcctgtgggacatttgggttgcttctagttgtttactcctactgagagcatttccttcccatctcttcatacctggtttcaaggttatttctgtaatgcaggtttacagaagttgaatgattggtcttgaacatcgttaagctcttggcacgtattttgccagattttccgctacacttgcaccacctttaagaccaataggatatcatcgtttacaaatatttgtcaatcccttagtatgtaccaggcactacatgtacaaagttcagaactttacgaaataatgtcataaaatcctcacgacaacctggcacatggtacttttatttccgttttatagctgaggaacatgagggtaagagaagcctggaaacgtgttcaaggtcaacaactcagaaatcacagaattgccatctgaaccctgtcttaatgctgcaacactcattcttaaatgctaggccacactatgggaggtgaaagggtcaacaggttgggtctgagaggcccacgtttgtacccttaaccgtgttaactaacgatcggccactgtacctggcttggcagacactttgttcagttgtttgagtgttttcactccatctgaaatgtccagcagctgaccagggtgatgtttctggaaggtgtcgtttcacatccatcacattatgaaatgggaaacgaatttgcttcttgacattgcccagcactaaatctttccagagtgttcaacttgcatctttgtaaattttctttttctttgtattagacgtgtgtcttttttcagttgtgtggtaggaagaccttgctctgttggtgtgagatcgaggtggcgtgggtgatagaacgcagtccccgatttgggggtagcacctccacctttccagtgcacgtgaggctcccttatcctcctgctgctcctcttcgcagccctgagggacgagggtggggacagggaccttgggtctgtttggggcctgtagggtaggtgactgtgtcatctgaaaaagcccacaggaggcgctgctccctcccctcctggtcaacagttggtgatctaaaggagtgcttctcaaccacggcccacacagtcactgggtagtggctcaaaccggcagggccctggcaccacctggacccactggagcagcatcttggggcaggggggcggggagtgaacaagcatgggtaattttttctttttcattttctttctttcttttctttttcttttctttttttcttttttttttttttttttttttgagacagtgtcttgctctgtcacccaggctggagtgcagtagcatgacctcagctcactgcaacttccacctcccaggttcaagtgattctcctgcctcagcctcctgagtagctggtactacaggcgtgcgccaccacgcccagctaatttttgtatttttagtagagacgaagtttcaccatgttggccaggctggtctagaattcctgacctcaagtgatccacccacctcagcctcccaaaggggtgggattacaggtgtgagccacggcgcccggccagcatggctaatttttcaaagttccctagtgattctaacgtgtagctaaagttgagaatcaggccatctaaatggtttgagtcccatagagcagcacttctcaaattatcaggtgcacatgtcccctggggatcctgatgaaatgcagaatctcattcaggaggcctggggcacagacagcctgcgtttctaggtccccagggatcccccgttgattcttacaggtcccagggaccggggcgcaatgggctttggacaaacccatccccacctccaagctcgtggcaggacagataaccagaaaatgttaaggtgttccgaaaggccaaagtgtggcactccccagcccccatgattctccctaaaggcctgcatctgagcttggcactgctccttaggaggtgtcctctcctgactctgctctgatggcctctttccccagtgggatctcaggaatccctgctatccctgttctgtataacccaagggacacacacaagggccaaggaccctgacgtgacctcagcagccttcactgtgtactgttcaaggagcttgaagtagggacaggacagggaagtgacaccctgggaacccctgagaatgagggaggtgtttgtgcagtgacctaatacagagaacacagagttgaagaggagaggaagatagcctgaaacaccccagaaagttctgtcccctgtttagcattaagaaaattatgttacatgttaatgaattacaataataaccaaatcctcataaggaatctggtgagaagctactaatttatacccatactcagagttttaaggtcccacaggtggtaccagcagaactgagcctgtgagccccagccctggagctcactaacagaagttattaattccagggactaaagcctacagtgctccctctgtaaagcccaattttaacgcattgcatgttggatttcattttcgcagaatatattaataaatgtgtacactaagactacagccaaggagcaggtaatgctcaaagggtggcgtgtggccacgtctgtgtgctgggattgcagtcactgtgctttgctcatcggtgctgtttatgtttcctgcaatatctacacattgctttttgttttgttttgccttcttttgcatccagacgaataatattgcaagttatttttaaattattgtttatttaagtactgatgatttgtgtttagaatctaaacggtaaacctcctgtgcttacatccaaagttagatctgcctccactggcctctttgccttgaagtctttctggaataaatgcggaatacttgacttactatgactgcagctgatccccccgcaggactcaccctctgcacatgtccccagagcctaagctggatttgtcccatcccaccttctcctagacttcctgggatgatagggagccctgtttcccctctcccaccccccaaatccaccagcctcactcagggaacactgttcaggcctaatttccagctccggctgagaaaagttggccgccagaaggaaaactaacgacactcaaaattatgtagggacagctttctcatgctttaaaaatccttggaagataacgtgattgaaaacgacgacgttcttattatacttccacgtgtgcgttagaaaaagacccacactttaaaaaagagtgtctactcttgggtgttggggtaatggtatttttaattttttatttgtgtactaggcacgccttttcacaccccctacctgttgtgacttgcgtgacctcagctcatgtttgtttacaatggttaatcctttcaaagcccctggatgtggggggctttgcccagctggtgtgaggctggggtctgtgtgtgtctgccctgccgtgcggcccgctgtgtgtttgtgcaacacaattgtgtcccaggaaggtgtgtgacaatctcaacctcattagcaccagcagcagtcagctcgcctgcggtgcaagaggaatggttggaaagctttgatgggcgtagagtttgccagctgacagagcagctgtcaatgagatgctgggcatgggctgcaggacgcgcattactttgacaaacatgtcattagatgttcattcttctgagtatgtctgacaccagccagagtggaaaaaccagtcccgccagccaaggagagctgtcctggaaagtagagaagtcaggaaacttccacataattcaggtggagaatacttgggaagacttctggattgcggagggtgggtggaacttgagcagacatcacccaggcagtggctcgcccccccagctctctgtgagtggccgtcgcttcggtcctgaaagccctgccacagtcacacacctctcagagcactgcccaccaccggacccagcatggaccaaaggaggagaaggaacattccagaagttcttcaaatcccaggttgtttcatggctacttccaatgtcttgtttttttctcctttggcttttgcgaatctgtatttgaaatacaactccttaatataggagctaagaggtttgctcaagtagggtctcttcctgccttccagaaatagaactaggaaatagatcaaattaggaagagcctctagggtggcagccagccttcttgtcaggccacagcaggaaagtctacgagggacagatccccagtgatgagccagcccacatctctgacctgttcctcctgttggattcctgcctgaacgtgctgggctgtgttcacaccgtgagagccacaggaaacagggcaggcagggccttgcagggaaggagattccagcctggctgcaggagttcaccagcccctccagggagcacagccacgtctggtcaggaatcttttaatgagtgaggagaaggacagggaagctgattggtggcccaggtggcaggcgaggtggctgtgtgcgtccatccatgcaggtggcagttagcacagctgtgcttcatgcttacaaagcagaggccagctacagatgctccaggcccttgatgagcctttgaacattcgttttaacctgaggcttagatcttctcctggttacttgtctggaatgtgcttgcttacttctagcaatggggagctgactccctagcaaacaacgccagcctttctgtgggcagctctggtaggaagtggatgctgtggggctctctttgcaccaggctttattcatttagacagatcggaatcccttaacccatttcttggagtcactaaaagcagatgtgttgccctccctgcagattcctttttaggctgagtaagccatcccacggacaggccgccggcaactttacacgttccgcttggatatccaagagttttttgacttctcagtctgtctgtgggctaattattaggccatacacacctgggtccacagggagagctgcccctacctgcttccccaccctgccgtggaccggctttcaggagcacccccactgatccaccccatcctaggtggcccaagcctgaatgtggtagctcaccagagccccagtcctcaccccctccctggcctcccccaccccacacttgctcctgacttggcctcctttatgtggggtgtgcagggcagccctatctggtggcctctgtgcttgctagggagcagcccaggctcacttggcatgcattcagccaccaagagagaagattttcttaccagccatctgccctggcccccatgaagagatcagtagcctgagagcagggagatgtccatgtgggcctccccaggcccctgtgcagagcgacaaggattttcacccctcctggtttgcctgagtcagactttgaaggagccatcactagggatttttatgaaattctttagttctctgggaatggagccctcccaccactcccaatgccatgtaagtctaaacttgagtgtgtgaattgcacgcacatttttggaaagtttgatgaatgaaaataagaagctgctattattctttggaagtcccaattctgagtcccttcactattcaggccacccttgggttcagtttgtccagattccacttagccatcttgctacttattgggtgacatttgtcataaaaaagaaacgagaaaaccgaacagaaacacatatctcaagcaatagagtccttcctgagctcatcacccccatgctgcacaaagaagcacacattaatcagaacttgtattttcaactgtaaagaacttttgaggattgcagttccttttgctaatgctgctggggttgtgcctggcgacatcctctcatcctccattcaacatccagcacccaggggccgtggcacattgccaaatgttggcttaaaatcacctacctggtcgtttcaggagaaccgagaacaaaaataacttacgtgacactttgaacttttcagtgactcagagatatttaaaggcagagaacatcttaatcgattattttaaatatgaagccatgttacgatgcaaatttgaggttagaaattgaatgtaagtggacaggaatggctctctgaagttcctgttagcagcttagtttggacttgacacagccgtgtgaactcagagaggcaagtgggtggtcacaggtggcccacacctgcagggttagagatggaaggttcagggcctcgatctgctggtggggctggcgcgggaggccagggcagggctcctccagtcattctgcccccaccccagcttccaggcaaaaatggctccagtgggccgtcactccagtctctgtgcaaccttcaccagcacccacgggttcaaaaataagaagcaagcgaagaaccgctgcctgacagtgcactatgagcattctcctggtgcctgactcctccctgaaggttaagaaaaaagttatttatatggaattccacaattcacacagtggattgacatgataagagaaagccacagttattcttggccccctttccatcatgcccatgggtaatcactgttagctgagtgtgttttctttttgtttgtttgtttgttttgagacggagtttcattcttgtcattcaggctggagtgcaatggcgcaacctcggctcactgcaacctccacctccagggttcaagcgattctcctgcctcagcctcctgagtagctgggattacaggcactcgccaccacgcccagcaaatttttgtatttttagtagagatggtgtttcaccatgttggccgggctggtctggaactcctgacctcaagtgatccactcgtctcggcctcccaaagtgctgagattacaggcgtgagccacagcacctggcctgagtgtgttttcttcctaacctcttccaaagcacatgtatggttatctttgtatatatttctggttttacatgcatattcagttgtacatactattgtacaacttttttcccttgaggatgtctcagagttccctctatatgcaccacatctggtgtgaatccaaccatctttcatcaatgtcttattaaagggtctttagattctttctaccttttgcttctaagagttgaatattactgcatatgccccagcagaatggcgggatcacagaacaagcacattaaaaattatcaaaggaaggcatacccctggttaatgaaggctgtcagacagaagggactataatataggaaaagcaacaaggccctgccccagtgtcaacttcccaaaagagttgttatttcctgtttctggttttagttcttcaggtaattatcatttctcaatgtaaagaagatgcctgcacctctctattgctgatccgttgaaacagtgcctgttgacttcctgccataataaatgaatatttccttcccttttgcaccccatctatctgctgctccctctgcatttcattcttttggggctgactcatccctaggttacatttgtgactttaaatgacatgttcccttcgtgatgacgagtgcctggagacccagtgttctgtggagccctggagatgagaatcacccccttccctgctacctccatcggcctcccgcctcccacccaggactcttactttgcacctttatttaattggaatgcatcagcaagaaaatgcctaagaaaggcctcctgggaggctcctgcaggagactctgtgttcctgagggcatctttattttgccctctcctgcgatctcaattggaatcctctgcctttggaaccttctcccttgtcctctgatgtggtgtgattctcactgccctgtggtgacctggttttccctttcagaagctttcagaatcttccctgtgtgcttggtcttccaaaattttccaacgaaagacctgggtgagggtcctcttccattcctgctgcttggcactgggtgggccaagcatgtatccctttcatgcatgggacatttcttgtattttctttgataatatttttctcttctgctttcgctatagttttgttttgtttgtttttctggaactcctattaattaagatacaggttgcttatcttttcgctcacattttccaactgttgttctttttcttaatgtttataaacttttgaccaggtccagtaacacactggtaatcacagctctttgagaggctgaggtgggcagatcacttgaagtcaggagttccagaccagcctggccaacgtggcgaaaccccgtctttactaaaaatacaaaaattagccgggtatggtggcacacacctgtagtcccagctactcaggaggctgaggcatgagaatcgcttgaacctgggaagcagaggttgcagtgagctgagatcacaccactccactccagcctgggccacagtgccagactccatctcaaaaaaaaaaaaaaaaaaaaaaaaaaaaaaaagatttgcttgacttcatcttctaacctgtctattgaacatttcattttggaactcagtcttaatttccaaaactctttcctgttcttggttgtttattttcatagcgttgtgctcctgtgttttgtacacagtattttcttgaatttcccagaggatcctaattgccatttattttattttattttggtgtcagtcttatcttctcagttaatttttatttatttatttaagatgtcaaaatcatgtattgaaaccaatattttacagtgaattccagacaaatcaataattatatgattcaaagcattattagggaaatttgcagtcagctgactttataggcaaagaatgtctataaattacatagaaagcaacttcctaggatactaagtcagtgaaaatgctggcagaaaaatatttttcactggcacttatttttgaagttctttttaatgacctctgcattctctacatttcttctaagccccagctttgtgtttgtctttattaattcagcatgattatttcaaccattcttaggcatccacttgtggaggacactgttccagatgctggggacacagcaggagtgtggcctctgcccttacagggcttccagttgtagcaggaaaagtagacagcaaagaacaagagagctgagcaaggtagctcatgcctgtaatcccagcactctgggaggccaagcaagtggatcacttgacttcaggagtttgagaccagcctggccaacatggcaaaaccccatctctacaaaaaaaaaaaaaaaaaaaaaaaaaattagccggtcgtggaggcacacacctgtggtcccagctacttgggggtgctgaggtgggaggattgtttgagcctaggaggcagagactgcagtgagcagagatcacaccactgcatttcagcctgggtgacacagcaagaaactgtctcaaaaaaaaaaaaaaaaaaaaggaaggaagaagaaaaccagagagtgatgctcaatgaagcattagagtaagatcatgtacaaaagaggcacagtgtggccattttgatttattattaggtaagacattgatgttgaatctcaggtctgctcagttgaccagaaggaggcagccacaggaaggctgggaagaagagggtttattgaacatactgaaaataacagagaatgatctgctcagccctccctcttgtgcctggtcttagtcctacactccaggctatgtcagagcctgctatggtcagggctctgggaagccaggaaaatgtcctcatgatgtttctattccagcaggggaaacacagtaaataaacctgcactctactgtcaggagtgaacagggccatgacagaaatcaaccaggttgcagggatggagagtgacaggcatagggcactactgctggtcagagatcagggaaggtgtctggggggaggtggcatttacacagaatgaagtgaatggaatcaggtcagtcctgtaaaggagctggggaaatggtgctcctggcaaggcatcagtgagtgcaaaggctgggcagcgggaatgagctcggtaggtttgactgaccgcaagatggcctgtgcagttggggcagagtgagagaagcaccaaatggggctggagaggtaaagccttcacagcaggagtgtagattttgttccaaggctgatggacacatctgaggagctgcatggttttatttagggaattagaaggctattgccagagccctggagagaaggcaccaggagggccaggatggtggggtagcagtgggaggaagagaatgcactgggaataggtctcaaaataaagctatcaggacttgtgtgggtatccacacacaagtatgtaacaaaccaccctatcacttgctggcttaaaagaacaacgaatgatcatttcccaggtttctgtgggtcaggaatctaggcagggcccagctggtggttcttcttgcttcactcccatgtctggcccctccgtgctcctccacatgacttctctctcttccacacaccttctcatccaccgcatgtctagcccaagcttctttacagcctactgccgaattcttggagtttagcagcagaagcctctaggcctcccaaggcataggcctagacctggtacagcatcacttcggccactacctgtgggtcaaaacaagtcaaaggccagtccagatttaggccggcacaggaaatagactctacctcctggtgagaggagcaggctttgatacgggttaggtgagtgacgagtaaaggaaggagggatcaaagatgtacccatcactcagatttaaccaacattcgttattttgtcatttttgctacaaagaaaatattttaagaagtcaaaccttacaggtacagccagaacgcctttggatctctccctgatcactgctctccttcaactccaggggtagccattattctgaagttagtctgaaccctttatggctgtatgtgtgtgtgtgtctgtaaatacatggtatcatttctgccttgccaggtggattccccctgggctaccatctattgcgcaggggttggcatgaactccacaatgtcatccactgagattagggaataggctttattaagagaaagaaaatcacaaagcctgaatctgcaagatggcatggcatgtggcccccagcctctcctttaacaagaagctatgccagggcatctactggatagggctggatggggctgggttctactccagccaagggtccagcctgggtcttccctctcagagcccagcctgtcaatagcatgctagctgtgggtgctggctgcttctatggggcaacttggggtctgtgggatgtgcagtcctctatgatgagccactagacccatgggaaactgagcttgggtgctatcacttcagctgggagaaggaggcatctcagctggctcattgtccagctgtggtagggatggggtaaccagagtcctgttttgtcaatcctgctcctttcagaacagtttccatactaaaaatgttggattaaatattttcatactatgccagtctttttgcatcttgcttcttcaaccaacataagtttgataatataagtatgtcctatattttccaagaagcagaatacatcactttgcctataaaaccatacaggcctggtgctttttaatgggtagatgtctcactattgattctctgtctttaaaggttataggtttatgtaaatgttctatttcttcttgagttattttatgcaatacaatttttagatagttatccatttaatctagattttcgaatattttagcatgaagttgataatggttcaggattttaaaatatatttttaaactatcttattcatttttaatagatgaatcatatacttacacacaatttaaaagaagtacaaaagggaatacaataaaaagtacccattcccgccccctacccaaacttactaccaattgccgtctcttccaaagaatcagggctactatttagttccccttttttattggcctcagaaaccacagtttttaggcctggactcaaaatggcacatttttctcttttcataagtctttagctacgtggaactttaaaatgttatatttttgtcttagatttctttttttaaaatgtttatttatttatttattattttattttatttatttattttgaggcggagtctcactctgtcccccaggctggagtgcagtggcgcgatctcagctcactgcaagctctgcctcccaggttgatgccattctcctgcctccacctcccaagcagctgggactacaggcgcccgccaccacgcccggctaatttttttgtatttttagtagagacggggtttcaccgtgttagccaggatggtctcgatctcctgacctcgtgatccgcccgtctcggcctcccaaagtgctgggattaccggcgtgagccactgcgcccagcctatttatttctttatttatttacttacttacttagagacagggtctcactctgtcacccaagcaggagtgcagtggcgacctctcggctcactacagccttgacagcctgggctttagcgatcctcctacctcatcctcctaagtagctgggactacaggcgcacaccaccatgcttggctaatttttgtattttttttttttttgtagagatgggggttcaccatgttgcccaggttggtctcgaactcctgagctcaagcaatccacttgcctcagcctcccaaggtgctgggattacagatgtgagccaccacacccggccactttttaaaattttttattacagaaacttttgaacacagtacacaagtagagagaatattaaaatgcacccctttgtacccattacccaatttcagtaattatcacacatgggcaatcttttttttaaccctcttgtttttagttgacatgtaataattgtgcttgtctatgggatacagagtgatacttggatacatgtatacaatgtgtaatgatcaaataaggataattagcatatctatcaccgcaaacatttttcatttcttggtgttgggaacatgcaaaagccactcttctagctttttgaaaacagaccacaaactattgttaactcgattccccctccagtgctctggtgcactggaacttactcctcccatgcaggtaacccaccttctgccatcctccctccttcccccacatggccaatctgcatccatgtaaacccccttctctctctttccagatgatttagaacccaattccatacttatagcttaagaagtctagaaaagaaaaaacaaaatacatttaacatacgtttaaatgtatgtttaaaagtgtatgttaatgtatgcccacaatagcatgctgttgacaggctaggcttctgagaggggagacccaggctggacccttggctggagagggccgggtgtggtggctcatgcctgtaatcctaggactttaggaggctgaggtgggtggatcacctgaggtcaggagtttgggaccaacctgactaacatggagaaaccccatctctactaaaaatacaaaaaactagcgaggcatggtggcgggcacctgtaatcccagctactcgggagactgagacaggagaatcgcttgaacccaggagatggacgttacagtgagcccagatcatgccattgcactccagcctgggcaacaagagtgaaactccatctcaaaataaataaaaaagtcaaaatatcaaatatctagtcagtgttcaaatgtcctgcattgtctctgtttttatcactggtttgtttggggcaggtttgttgagtcagtgcccttgcatgctgggacatgggacagtacagttcctaagtctcttaatttctatctttctccctcaatttctttttcattgcagtttcttttgttgataaagccatattgtttgtcctttgcaattttccacagtctggatttttggcaattgcatttctatgtgtggcctgacatgttcccaccttccctatgtttttgtagatccagaggcctgattagatttagtaagatgttttggcaaaaatgcccaatagatggtgggttcttcctcctgcatcacctagtcacagaatgtctaattgtctctctctgatgtttagagttttttaatgattttcagtggtgtcagcgcaatcactctttataaacgtcctaatggtttttcgacttttcacacaatggttttatcagtcattgatggttgcttagatcaattatttaatttgaggttgcaaagtggtgttattttaagtctatcttaccttcttcatttatcagctgaaagtgatctctaaagaagaaatttcttccattaactctgtggtaccctgagttacagtttgtacagcaaagtcggggtaaatagttgggtttttttctcttagttttcttattcattctactgaaaataagtcaattccctagcaccttttgaaggcggccaatgaaggtggggttttttttccttagtatcattatgaactcatgaattttaatttatttgattcttgatgctaacgctgttcctcttttgccagtaggccccctgagtaggttcctctatcttttggcatgaccccagaagtctttgataacttccttgctttctgatgtgacaagacatccagggccagattgtccatatcctgccccggatgcacgatgcactgtttctccaagaatccctgtgtcctttgctgatgatgccatgattttaagttctctaatatagttttatctctttgtttcagataatgcttttgtgttctcacatgtcctgctctctctctctctctcattttgttgttgatcagtctttccataagattgtttatttcactagtccttcattcttcttttttctaaatttactcttcttgactagtatcctgtcacttctgaggactcatatttttgcaacttgaaaattattcttatttatttaagtatatgtttctgaaactctcattagacacattttgaaaaacttcaaaaaatatcttcaatgtctctcactcttttatctctgctcccggcctccttgtcttttggtgctgcatcctcctcttggtcttccagattcctgatttgtccttcaacggtgtctctgctctgcagctcacccactgtgcttcacagtgcaactcttctcgttttaattcccaagagttttagttgattcttgtttgtggatgctgcatcctcctgtttctctccaagacatcagtaatatttattctgaattcattctcgctctgctaacattaattctgtgtagagaggggccctggaggtgctggaaagctggagcctgagattctgcttagggaagctcccatgctaactcagtcttttcctccaagataaggatgaacagttgacaataccaagctgtgttgtgaatcaggaaagcccaaagctgtcttatctcagtgactgtgtgatttgtgtaggtttgccccgaacagtaatgtgaggatgcagcaagatgtgcaggccctctgacctggctagaccctgccttgcagagacattgtcactgtcagctgctcacttcctcctggggactctgaggcccaagggggacagtggtgaaatatgacacagcttctcccctaggtgatcagactgcttccaatgagcctgtgcccttggctacataaagaggaaacataaatattttctgtgtgtgtgtgtctgtgtgtgtctctttgtatgtgtgtctgtgtgtctgcatatctatgtgtgtgtctgtgtgtctttgtgcatgtgtgtttctgtgtgtgtctgtatgtgtctgtgtgtgtgtctgtgtgtgtctgtctgtgtgtgtgtctgtgtctctgtgtgtgtccgtgtgtgtgtctgtgtgtgtctatgtgtgtgtgtctgtgtgtgtgtgtctgtgtctctgtgtgtgtctttgtgtgtgtgtgtgtgtgcctgtatgtgtgtgtctgtgtctctgtgtgtgtctgtgtgtgtctctgtgtgtgtgtgtgtctgtgtgtgtgtgtgtgtctgtgtgtgtctatgtctctgtgtgtgtgtgtgtgtgtgtgtgtgtgtgtgtgtgtgtaaggtgggatgtctcttcctgctgatcggtggcctgcctgtgtgctggcttggttagaggagtttcgtgcttctctttatggcgctgctcttcctcagatgcttgcgggtgcctgggtggatgctgactgttctgctcgggattccccgtagctgtctgtgaacacagcatttgtcacaatagcctgcgaagaggagggccaggggactgtagcaggctgccttggggacatccagagcatggcttccgggtggtgggctccgtgtgcctcctgggagttgcccagcacactttctctttagcccacatcgagtgtagacccatcagtcccaggctgcctggcacaagctggagaggggccagatccacaggagtctgcccactatggctccccactcctcccagtcgccctgctggtgacctggggaccctcttgcttcccatgtcccccagcagcctcggagctctcccaagccttctccacctcacgcacagtggattccggtcttctcaggtcacttcttttcccatgctaataaggcttgttgatatttgtaataatttctaaggatttggagcaggaggtggtggctgcagccgggctcagcctactgtcttgatctcatcttccagcgtctcctgggcatctccaaggtgtgcacttgcaggaaatactgagtgagaatgtcaagaaccggctctacagtcggaaggaaccgggttcaaatcctgatgcttccacagctagtcctatctgtgacaggggcagggttagaatctgtttgcggaatggttagcaccatactaagtgcacatgctaggcagaccctcaaaaaaaatggcctgttctttttctctttctctgttgggcaaattatgtagcctcaactggactctatttctattagggaaaatgataataatattacaatgattaaaaagtagggtccttacaaaatggtgagtccgattttatttggctctaagctagagaaggcatggctcacagttatggaagacatggatttaaaatgtggccagtcttcatttccaaatgtgtgtacacgaaagtgtgatgaccctcaaatctaatcatcaaaattaaagctgtttaattaacattttaaattaaaatgtttcaattaaagtccaaatctttccttgccttatcttcagaatgctttttcttttcttttttttccaaattacaaaacctgtatgtctcactgaagaaaactggtacagtgtgaagttcgacaattcacggagtaagcaaggctgacgatgggtgcccggagtccccctctggttctgttggtagcagccttgggtcctcatgaggcctctctgctcacagtgggcgggtggggtgtgcactcacccggagacggcctccatgtccatgctgaacaactcccagggttctccatccgccagtgcttactgatcaacccgtagtgctggccatcccttttcaacaagtttggaaggtgcttttttcccggttttcacagagtaactcagaagtgacttaataaaaatatgcacaaactgtcttggtatgttccaaattgggatcttatataaagactcctgggcctaaggcaacagtctatgtaaagtgaattatttcactttcttaaaatagggacaagatggcctgcctttccttcaagtgtaattttaatctttctgttttactccaagggggtgtaacagcttgctgagtcattgttttctgcctttttaataaaaattaattcagtgatttagagtggaaattctgccccctcccttgggcaagtcactgactctctggggacctctttctttatctgtaagcagagctaatactagcatctgatggggttaaatgaattaacctaagtgtttcctttgaatatttactcactgcctttacaaaataatgtttctattctcactttctcccccaaatttctacaaaacaacaaatttctatctttgttgttattgccatatgatttctaaaaatttaaataaacaagcagtagctttaggaagttacaaagataaactatcagaaacttactgaattggatcttagataatgtccctttttacttggttctttttttttttttaagctaaaaataagtttagttcctcctcagttcttggcatttttgtgatcatttgtttgcaagtgatcgtatcttttttttttttttgtcactcaggcaggagtgcgatggtgtgatctcggctcactgcaacatccgcctcctgggttcaagcgattctcctgcctcagcctcccaagcagctgggattacaggcgcccaccagtatgcccagctaatttttgtatttttggtagagacagggtttcaccatgttagtcaggctggtctcgaactcctgacctcaggtgacctgcccacctcggcctcccaaagtgctgggattacaggtgtgagccaccacacccggtcgtgatcccttatcttaaatgttcagcctccagccattcataatgaatgccttgaacacaggtcagagaaaaatcatgaagcggggctgttagtgaggtttgggtgggcatggggcctcacagtggggcccagacattctcagagtgtttcagttgctgaggaatcatggagcttcttgctttaatatcaggatattgctcatgaaaaaaaggaggagacctattgttgttcagccagagcttgtactaaatggaagtagtttgcaccatacacaagcaggcttctccatccaggaaaaagatctgtgactgcaacaaccacagcgcagcattgatctaactcagctatgcaccaaaaacccagctgcagagcagtgcagcacccaggaaatgttaactctcgctgcagactgaggatcttctcagagtttgtatcttaggtcgaaggggtggggtaggcaagctttcacttctgttcagcattatcttttacaaggatgggtttgtggcatttgctttaacctttcggaggctacactgtaatcactcactgggttcacctcaaatcctcacatgatagacaccagcctacaattctaccagctacggaggactcctgatcttggcttttttgcttctattttgtgtgcttgcttttgtgtttggaaggcagatggcagtcctagtattgagacaaatcagctggagtcaatttctgttgtttgaacttgagggtatatatctcagcctggaagacatgcagaggaaaaggaagaaaacatgacctcatatttgttcccttgccaatatgttaaaactttagttgtttgaaaatgtcatacggtcttatggttcaaaaatcataagtatcgatctacaatcctgagattcttacatccttccagaatcttttttataagtaaagaagcaaaacaaagatagagtctgatttttcccctcttttacacaaaatgtagctgatcgcagatgctgttctgtgccttgcctgtttctttcacacattaagggtgtcattggcctccttttagtcaactgcatagtgttctgtgacatggatgcaactcagttatacaggcggtctcctcttcacgggcatttgggcgattcctaacatgtgctgtaacaaataatgccagatgtctgttcccatgtatagaagctcatctatacaacacattcccaaagtgatgggtcacggggcatatatgcttcgaaaaatctgacagatgttgctaagcagcccttcaggagagtttttcctgtttatgccccaatccctgaaaacatgtgtgcgtgtctgtttcccagtggctgacaagtatttattaccaaatgtttgctttttcctaatgtgatatgtgaaaaatggtacctcagcctagttagaatatgcacttctcttacgatgagtgtgaccaagcatgttttagcatgcgtaagaagtagctatatttacttttttaaaaactatctctgcagagcctctttttttttttttttttttttttttttttttgacagagtcttgctctgtcactcaggctggagtgcaatggcacaacctcggctcactgcaacctccgcctcctgggttcaaatgattatcctgcctcagcctcccgagtagctgggatcacaggcgcccaccaacacactggctaatttttgtatttttagaaaagaaggggtttcaccatgttggccaggctggtctcaaactcctaatctcaggtgatccacctgcctcggcttcccaaagtgctgggattacaggcatgagccacagtgcccagccttcatattctttattaatcaatttttgaggaactctgattttccttatcaatttctaggcgctgttagtgtcggcacggtatctattcgttgttaacctataattagatgctctatcaagatctatctaagaacacagaaaactgaaatgaaaactttgaatattcaaagaggctatagaggaaatacgctgcttttttctcttaattattaaatgaatatgttaaatataaaatacttaggggaaatagcggtaaatatatcaggcctacctaagaacaccttaaactcttgacataaaggatatttgagtaagaaaaataacatatcatcttcttgtgtaggaggacttaatattgtaaatatatcaattctccacaaattgatcctatcatttaatgcattctcaattagaatacaaacaggatttctttttggaacatggaaaaagtataataaattttacctagagaaataaacctatgagaatacaggaaagttcaggtggggaggggatggggtgagaggaggggaggagattagttgcagcgtatgctaaaatttattccaatgccaccataatgactggggttggagactagcgagacaatgcacagagaaagcaatggaacagtgtggcaatctgaaaataggccaaaatgcacattgattttgccttgctagttagaattataattagtccaggaaaggtttatttgggaatagcataggggtaacatattgctttctcactcccactccaacatcattttcagatggatcaaatctatagcatggatgcaactcagctatacaggcagtctcctcttcacgggcatttgggcgattcctaatatgtgctgtaacaaataacgctagatgtcttaagcataaaaatcaacaccactaaaagtctaggaaaatgatgaaactaaacagttttggagtaaaggatatttttctaagcacagcaccaaacctagacatcataaatttaggagaacttgaatgaatgttgaacaacataccaattagaactattcagtagcaaagcccttcttaagtgccagtcaacgaataggtagaaaactattttcaacacagattccaaagagctcttttccttcatttgcaaagagcattaacaaaaagaacattccaattttctttctttcttttttctttttctttttttttgagacggagtcctgctctgtcaccaggctggagtgcagtgtcacgatctcagctcactgcaacctccgcctcccagcttcaagcgattcctctgcctcagctgggattacaggcccgcaccaccataactggctaatttttttgtattttagtagaggcggggtttcaccatgttggccaagatggtctccatctcctgacctcgtgatccgcccgcctcggcctcccaaagtgctgggattacaggtgtgagccaccatgcccaggctccagttttcaaatcaaacaaaacacaggattaggcagtttaatttagttaatagaaaaaaatagaaacaattgataaacatagaaaatacactgtgcccattcctatggaaagaaatgcaaatgaaaaccaattatgagatatcttattctgttttacagattggaaaaatcagaaagtttggtattatttaatgtagtaagactatcgttttgttctactttatatatattttttattctcaatattttaactcaatattggagttaataattgaggctatcttgaaaagaacttattgagcagaaattggcaatatttattaaaattaggactgagtatatcctctgctccttccgctgctggagattttatagttgctacgtgggcagaaacgcatatgcatttcccaggatgtttatgtcagcattgcagagactaaggaaaaactggaaatgccctaaatgttcatccatgaagacaggaagctatcatgaagaagagtgtgctagatctccatgtgcctatgcagaagaactttcaagcaggaaaaacaagatgcagaacatgattatcgtataatccatttgttaaaaaagtagaggaggagaaatgaatatttatgtgagatccagggaaacgtgagctgctccatgacctttgtctgcacagtgatgtattcaaaggaaactccagcctggaatcttaaaatcaacaagcagctgaagtctttaagacagttgcttgacaaggcatccacggggaattccactgaaagcacacagacacactgctgaactcctttgcccagctcttcccaaaaagctcacaaaatacagtctctgtcatcaatcttaaacctcgttctctcaagaaagctcccaggtgctacccccaaagccagcttgtcttgttatgcatgtaggtttctgtttctgagtctgtcttcctccacatctgccctttccaatgcagacacctcagcccctcggcaccccttccctgcctgcccagcaccaggaaggtgcacttggacttccttagggtaaaggaggaggcagaggcggccagatgggacacctcctcatgggtttcgtccccgccgtttgaatgtgacttatgaatgcacggaggtcatgaaagggatgtagttttgctaagtattggtaaattcccctccctgtgggttgtaccattttgcattctctccaccaattaaagagcatgtttgtttcctcatattaaccctttgtctatacgttgcaaatttttttttctaagtcgccatttgtctttttaccttgtttctgtgttttgagatgtggagttggagtttttatccttatatgtttaaatgttatgtttggccataaaacaagcctccataaatgtaaaagaatggaaatcatacaaaatatattcggtgaccacaatagaaagaagttagaaatcaataacagaaagaaatttgggaaattcacaaatatgtagaaattaaacaacacactattaaagaacgaatgtgttaaagaagaaatcacaaaaaaacagaatatactttgcgatgaattaaaacaaaaacacatcacgctaacacttaagggatacagctaaagcagtgctcagagtaaaatttatagcagcagctacctatatgtaaaaaagaagaaagatctcaaatcaataacctaaacttccaccttaagaaactagaaaaagaatagactaaaccgaaagcaagtagaaggaaggaaataacaaaaattagagcagaaaaaaataaaatagagaatataaaagcagtagggaaaatcagtgaaatcaaaagttagttctttgaaaaaaccaacgatttttgttgacaaacctttagttagaatgaccttaaaaataaaaaggagaaggctcaaattaccaagatcaggaatgaaagaggaacatcgctggcaaccttatagaaataaaaaaagattataggaaaatactgtgaacaatttgcaccaacaaattcaataacctagatgaaataaagtcctagaaagacacaaactatccaaactgactcaagaagaagtagaaaatctaattacacttaaaacaagtagagagactgaattagtaataaataaataagtaattccccacaaagaaaagccaggcccagatagtttcactggtgaattctaccaaacatttaaagaagagttaacatcaacttcacaaactcttccaaacaataaaatatggaagaatacttcccaattcagtctatgaaaccagtattaccctgaagccaaaaccagaaaaagatctcacaggaaaactacagaccactacctctttcaaatatagatgcaaaatctcaacaagacactagcaaaccgaatttagtaacacataaaaaggattatacgccatgaccaagtggaatttatcttaggattccaagcttggtttaacatcaatcaatataataatccatattaatagaataaaggagaaaaaatatatgatcatctcaatagacacagaaaagcatttaacaaaattcactaccctttgatgagaaacactcagtaaactagtaatagaaggaaacttcctcaatctgataaactgcatctgttaacaaaaaaaaaacccataactaacatcatacttaatagtgaaagactgactgctttctccctaacatcaggaacaaaacaaggatgtccactctcactacttctattcaacattacactggaggttcttgccagggcaaagacaagaaaaagaaatgaaatccaaattggagaggtaaaactatattttccggtgacatcatactgtacgtagaatattctaaacaacacacaaaagacaattagaactaatagttcagcaaatttgcaggatgcaagatcaaaatgtaaaaatcaattgtggttgtatgaattatcacttaacaatctgaaaatttaattaagaaaacacatttacaatagtatccaaaagaataaaaaatttgggaataaatgtaacaaaagaagcgtaagatttatacaccaaaaactgcaaaacattgtggaaagaagttaaaaagaacctgaataaatgaaaaaacattctgtattcatggattggaagacttaataatggtaagatggcaatactccccaaattgacttatgcattcaatgcagtctctttaaaatcctagctgaaattcttacaaaaatggcaagatgattctaatattcaaataaaatacaagagaatggctaaacctataaaactcttaaaagaaaacaggattaaatctttatgaccttggattaggcaatagtttctcagatactacaccaaaaacacaagcgacaaaaggaaaaataggtagtaagttggacttcatcagttaaaaatttttgttcttcaatagacataatcaagaaagtgaaaagaacctgtgaaatgggagaaaatatttccaaattatttatctttaaaggacttgtatctgattatataaagaactctcacaattcagcaacaaaaaaacaacccaatttaaaaaagagcaggccgggcgcggtggctcgcgcctgtcatcccagcactttgggaggccaaggcgggcagatcacgaggtcaggagatcgagaccatcctggctaacacggtgaaacgccatctctactaaaaatacaaaaaattagccgggcgtggtggcgggcgcctgtagtcccagctatttgggaggctgaggcaggagaatggcgtgaacccgggaggcggagcttgcagggagcagaggttgcgccaccgcactccagcctgggctacagagtgagactccgtctcagaaaaaaagagcaaagggtctaaacagactaaatagacatttatccaaagaagatgtgaaaatggccaatcagcacatgaaaagatgctcaacatcattaatcattatggaaatgcgaagcaaaaccaccatgagataccacttcacacccaacagaaaggacaacagaaagacagatggaaaatggcaagcggtagtcaggatatggagaaattggagcgttcattcattgaaggtgggactggaacatgctgcaggcagtttggaaaatggtttggcagtttctcaacattttgaacatgcaattaccatatgacccagcaattccactcctgagtatatacacaagagaactgagggcagatattcacagaaaaacttgcacataagtgatcacggtagcattattcctaataaccaaaaagtggaaaaacccaagctcccatcagctgatgaataaataaacaaatgtggtctattcatacagtggaatattacgcagcaatagcaaggaaataatagcattactagcaagtatgaattaatacttaataattaaataataaggccgggcatagtggctcacacctgtaatcccagcactttgggaggccgagacaggtggatcatctcaggtcaggagtttgagaccagcctggccaacatggtgaaatcctgtttctactaaaaatacaaatattagccaggcatggtggcatgcgtctgtaatcccagctacttaggaggctgaggcaggagaatggcttgaacgcgggaggcagaggttgcaagtgagctgagatcgcaccattgcactcccacttgggcaacaagagcgaaactccatctcagaaaaaaaaaaataataataataataataataaaataatagtattattaagagtaagtactaatatatgctacaacatgaataagtcttgaaaacatgctgagtgaaagaactaagtcacaaaaaccatattgtattattccacgtatatgacatgttcagaagaggcaaactgtagagatagaaagtagattagtggttggcagggacctggaggaggaagtgggaactgactggtataagcgtatatttgcagggtggtacaaatgttttaaaattagaaagcggtgatagttacacaactctgtgaatatattcaaacccactgaattgtacacttttaaatggtgaattttatgatacgtgaattatctctcaataaagctgtgatcttttaaatgtgaccgatgtatccatcttttattacttctgggttgtgagccacagttaaaggggttatacactcccaggctaaaaaggaatttgcctgtgttttcttctaatgcctacatcgttttatttttttacattatatctctaattcatttggaattatcttggtgtttcacgggagtaacggatctgatcatatatttttccatgtggctatccagttggacaaacaccattgattagcccactcttctttgtggggcccttctcacaggacctgactcctgccctggcccactctttcctctgatggagacagcattcaatcccagcatacctttccctggaaatggtatcaaatgcttgtcaggctttcaggtacatccacgttttatcacagtaatcattcccatcagtgatttttatggtgattaaccagacaattaactcggctgcctccaggttttaagtctgcgtcataaagcttacatcttacttgggaatattactgggcattccttatgctttaagcaagatcttttaacagaatctattgaccaaaattaactctagggccactcatttgaatgttggctaatctcattaagcagcatttttattcacttactttacagttttattgaggtataattgccaaataaaaattatatatttcatgtatataatgtgattatttgatatacataaatgttgcaaaatgatgagcataatcaagttaatgaacacatctaccatttcacataattacctttgtgtgcccgtgtgtattaacaacacttaagatctactcttttagtaaatttcaagtatacaattcagtattattaactatatactcaacaggctgtacattagatccccgaacttactcatcttataactaaaagtttgtacccttcaaccaacacctccctatttctcccatgccccagctcttggcaaccaccattcactctcggcttctttaatttggactttttaagattccacatataagtgagatcatagagtatttgtcttctgtgtctggcctatttcacttagcataatgttctccaggttcacccatgttgcaaatgacagaatttacttccttttaaaggttgtatagtattccattgtgtgtgtgtatgtgtgtgtctatatatatatatatatatatatatacacacatatgtatatgtatataagccatattttctctctccatctgtcaaaggacacaggttgtttccatatcttggctcttgtgaataatgctacataccgttaatatggggttacagatatctcttcgagatactgatttcctttcctttgggtaaatacccagcagtgggatttctgaatcatagggtagttctatttttaattttttgaggagccttcatactttttcccataatggctgctaccttacattcccagcaacactgtatgagtgttcccttctccttgtcaacatgtgttatccttgtcttttttataataatcaccctaacaggtgtgaggtaataacacataggtttttttgtttgtttgtttgttttgttgttgttgttgtttgagacacagtctcactgtgtcccccaggctggagggcagtggcacaatctcggctcactgcaacctctgtctcccaggttcaagcaattcttctgcctcagcctcaccagtacctgggtctacaggcacacaccaccacgcctggctaatttttgtatttttagtagaaatgaggtttcatcatattggccaggctggtctcgaactcctgacctcgtgatctgcccgcctcggcctcccaaagtgctgggattacaggtgtgagtcaccgtgcccggcctaactcatgtttttaatttccatttccctgatgattagacgtgccgacaaccttttcctatacctttggtcatttgtatgtcttcttcggaaaatttttattcaggtcctttgcccattttaaaaatcaagttatttagctttttttgctattaaatcatatgggttctttacacattttgaatattaaccccttatcagatatatggtttgcaatattttctctcattccataggttgccttttcattttgttgattgtttcctttgctgtggtttttagtttgatgtaatcccatttgtttatttgtgctttggttgcctgtactttcagtgtcatataggaaagatcattgccaagaataatgtcaaggagattttttcctatgttttctcctaggagttttactgtttcatatgttttaagtctttaatttatttctagttaatttctgtgcatggcataagatatgggtccaatttcattgtcttgcatgtagatgtccagtttttttcgacactatttattgaaaaggccattcttctccattgtgcattttaggcacctttctcaaagattagttatttgtatatgcatacatttatttctggactctccattctgtttcactggcctatgtgtctattttaacacatagaccaatgcatacaattagaaccatactgttttgcttataatttgtaacacagttttaaatcaggaagtgtgatgcttctagctatgttctttctcaagattgctttggctaattgggggtcgtctgtggttccatacaaattttaggatttttttttctatttttgtgaaaaatgccattggaattttgacaggaattgcattgagtctgtggatcactttgagtagtatggacattttaacagtattaatgcttccaatccatggagacaggatatctttccatttatttgtgtctttttcaatttctttcatcaatgtcttatagtttttagtgtatagatctttctgcttcttggttaaatttactcctaagtattttctgtagctattgtaaaagggattgttttcttaatttctttttctaaaagcttattgttggtgtatagaactgcaaatgattttttgtatgttgattttgtgtcctgcaactttactgaatttatttattagttctaggagttttctggtggagtctttaggttttctgcatataagatcatgtcatctgcaaacagagaccaattgacttcttcttttcttatttggatgtcttttatttctttttcttacctaatttctctggctaggacttctagtagaagtggcaagagtgggcatacttgtcttgttcctgatcttggagaaaatgctttcagcttttcaccattaagtatgatcatagctgtaggcttgttttatatggcctttatgatattaaagtacattcctgctataaccaacttgttgagaatttttattttgaaaggatgttgaatttttactaatgtttttttctgcatttattgagttcattatatgatttttatcctttattctgttaatgtggtgtatcgtgtctgttgatttgcatatgctgaaccatccttgcttcccaggcttaaactgaacttcataatggtgtatgatttttttaatgtgctgttgaaatgagtttgcctgtatcctcttgaggatttttgcacctaagttcagcagggatattggtctgtaattttcttttcttatggtgtttttatctggctgtggtaggaggtattgctaatcttgtaaaacaagttcgaaagtctttattgtcttcaatatttggaagagtttaggaaggactggcattcactcttctttaaacgtttggtagaattcacctgtgaagccatctatctgattctgggctttttattgttaggaggtttttgattacttcctcagtctctttactcattattggcctgttcagattttctatttctgtatgacttatttttgataggtagtatgtttctaagaatttatccatttcttccaggttatctaatttgtttgtgtataattgttatagtagtctcataatactttgtacttctattataccaattgtaatgccccctatttcatttataattgtatttatttgagttctctttcttttttttcttagtctagctaacgatttgtcaattaaaaaaaaaaactcttactttcgcttttctttccttttttttttcttttttttttttttttttgagacagaatctcactctgtcacccccaggctggagggctggagtgcagtggcacgatcttggctcactgcagcctccacctcccgggttcaagcaactctctgcctcagcctcctgagtagctgggattacaggcgcccacaaccacgcctggctaatttttgtgtttttagtagagacagggtttcaccatcttgaccaggctggtcttgaactcctgaccccatgatctgcactccttggcctcccaaagtgctgggattgcaggcgtgagccaccatgaccagcctgatcttttctattatctatttagtctctatttcgtttatttctgctctaatacttattttctttcttctaactttgggctcagtttgctctttttctagttccttaaagtgtaaagttagtttgtctaattaagatatttctttttgcttaatgtaggcatttctggctgtcaactttcatcttagaactgcttttgctgtatcccgtaagttttggtatgttgtgtttccttttcgacttgtctgaagatactttctgatttcctttttgatttcttctatgacccattggttgttcaggagtatgtggtttaatttccacatatatgtggatttttccattttcttcttgttattgacttctagttttacaccattatgataagaaaagaaacttgataatatttccatcatcttaaatatgttaagacttgttttatggcccaacatatgacatttcttggggaatgtcccacgtgtgcttgagaaaaaattatattctctcgctgttgaaggcattgttctgcatatgtctgttaggtctatttggtctatagtattattcaaattcactgttttcttattaattttctgtctggatgatctatctattattgaaagtagggtattgaagtcccctactattattatattgctatatatttctcccttcagttctgttaatatttgctttacttatttatgtgctccaatgttaggtacatacatatttaaaattagtacactcttttaatgaattgacccctttatcattatatagtgaccttctttgtcacttctgacagattttgactgaaagtctattcagtctggtataagtatcgccattctttagctcttttggtttcatttgcatgaaatatcttttgtcattccttcactttccatctatgtgtatgtttaaagcaaaagtggatctcttataggtagcatattgctggttcttggattttttaatctattcagctactgtgtgtcttttgattggaaaagtcaatccatttatatttaaagtagttactgacaagtaaggacatacttttgccaattttttaattattttcggattgttctgtagttggctgttgttgttgttgctgagacggagtctcactctgtcaccctggctggagtgcagtggcgtgatctctgctcactgcaacctccgcctcccaggttcaagtgattctcctgcctcagcctcctgagtagctgggattacaggcagccaccaccacacccaactaatttttgtgtgacagggtttcaccatgttggccaggctggtctcaaactcctgaccgcaagtgatctgcccgccttagcctcccaaagttctgggattacaggcatgaacccccacacccagcctgttctgtagttcttttgttcttttctttctctctttgtatcttcctttttaatttgttgtttttctgtagtaggttaagcagcatttttaaataagggaactatcagagtaaacaattggggcccttcattttggcacaaacatgtatactgaatatttattgagcttcagctgtatgctgggcagcatgcaggaatatggctgtttccactggtatatactgtcctgtctggagttgatgtttgggtgttttggatacgtctgtacctctgctccccagcaagcccagcaagggtgctaaagcaaggcttttgtcttccacttcttggcctcactaacatttgacccatagctaagtaaataagattccaatacccactgacttattcatttgaataggcatgattcatcccagatggctaaggaataagatagaaaccccagacttcacagttttcagagaggggccaaatttctaacttaacttcaaataacaataatagtagctagcatttatctagagcctctcggggtcaggcagtgttctaagcacttctcgtgcttccatccacttgaccctcacaataacccctctgaagtaggtgccaccatccgaagtggagaggacggaaatgtgcagggcctggaggtgggcccaggaagcagcgcggggtcagcatggtggtcacacttctccgtttctctcccgggctctctgtgctctgggacttccttccctgccaacgttttgcagtcatgtatttctgggcagtgtgtatgactaaggtctcagatacttttatgacttggaaagcccccacatattatcttgaaagagtttacattttgacctgatatgaaccctaccactgttgtgctgaagtgaccagaccttagggaagggttggagggggatgtgtggctgagtggccaaaagaaaatcattcttggaaaggaaaatttagaagtgcctgaaggcatcattctcctcctcttttgctgggagaattctgtacccctgtggccgtaactgtagatgggcaaaattatagacgacccccttactaatatgcagagagctctggacggtcaacaaattgaagtggagaggctttcagtgatacagtctagataggcacccacggcagtgagtaagcagaacccagcctgcgggcagccctgggcagagcaggaggctggcagacctactctgcaggggacagtccaggacccaggtcagaccacgtgcaggcggagaaaggagaggcagcccgctgggaaattctgcaagtcctttctggggtgcacccctgcgctaggctagaaggaggagaatttcgagaagcatggaaagcgtaagggctccttccagataaggcagacacaggaacaaaagctaagggaagcttggtccatagaggaaatgagagtgcagtctggcagcctcacaggcacctggagtagggaggaaggggccaggcctcctggaaatcacccccatttgtgtgctcaccgcttctctttgtgtatgtatttttttattcatatgcattgtgcaatatcttttatatgtgccattttcttttacaagaagatgataatattcagacatcttaaatacttgccaaacaccatgctatgtcaaatagcacagctggggcttgaaaccaagtcttccaatgtacagagttcagttcttcctgtaactgcgggttttcacacagttctcagtagatggcatgattggaaaactctcggtgcctcatcctaaatgttcctttcagattgagacattttcttcctttccttgcactcatttttgttgggaggaagttaaatccagttagcaaatgtactttgtcaacctgaaaagcattttttttaatataacaatgttgttatagtagtaatagagaaataactggaaaatagagaaaagggtctcgagaagttcaccttgaattccgccacgtaagaaaaaccagagttatcgttttgggggcttcctccttgacagttttcctgtttgtgtagttccagggtctgtgcattataattgtcaaaatcaccgttctttgctctactgaacagtgctgcaatcagcatctacgttcatattgcttttttttttttttttgcatagtgctttttaaatgtgtagaactattcttttggaatcagtttcccagaagcaacgtggcaatgtcaaagggtgtcctaatcctccagtatttataatcacaatcatcttccccaaaatcggagtaggactgactgtgtgtgtgtgtttatcttcgaattgtaccattttctatagtattactgagtattaaataaatgaactgtcctatttatgtgatttttaattttccaaaaagatggttctcctttttttaccaggtcagtttttgtctgttggctctcccaagtccctcaagcatccccttttgggtaaagggcatggtttctgttgtgggtgtttgaaagtaaactctggaaatactgtagcagcgcacttgagctctttctgtgtgtctcagcaagctgtgtccccagggtccagctcagcacataggaggtactaaatatttgtagaacgaatgagcaataaataaatgaatttttggaagaggaacaaaatctaggaaagaattcatcttcatagctttgtatttctgtgtttctcttcttctacagcagaaaattaatggagggattggtttccatttcctctccgttttttccatctaatgagacagggtcatctcatgttttcgttcccacatttctgccatgcatgttaggtgctgaataagagtctcatgtttggctgttgtcttagttcgttttctgttgctataactggatgccagagactgggtaatttataaagaaaatgaatttgtttcttacagttctgaaagctgggaggtctatggctgaggggctgcatctggtcagggcttcttgctggtggggactggctgcagagtcctgaggtggtgccgggcatcacatggcaaagggcctgagtgtgctggctcaggtctcttttcctattcttataaagccaccagtcttattacagggtccccaccatagtgaccttatccaatcttgattatgtcccaaaggctgcaactcctaataccattacaatggggattaagtttcaacatgaattttggaggggacattaaaaccatagcagttggtggctgggcgcggtggctcacgcctgtaatcccagcactttgggaggccaaggcgggcagatcacgaggtcaagcgatcaagaccatactggccaacatggtgaaaccctgtctctactaaaaatacaaaaattagccgggcatggtggtgcgtgcctgtaatcccagctactcgggaggctgaggcaggagaatcacttgaatctgggaggcagaggttgcagttagccgagatcgcgccaccgcactccagcctagcaacagagtgagactccgtcaaaaaaaaaaaaaaaaaccatagcagttgggaacacacaacctaggaagcagaggatgagctttgatggcaggtgctgggggtccaaatctcagctctgttgttgggagctgggtgggggaagtttctctaaccactcagggcactggtcaccttgtggtgagtgatgatgagaagcctagccttgtatgggtgttgggaggaagtcaaatgcacgcaggacactttctacagcatccggcaggactcaataaatggcaccaatgaccaatacatgaaacattattataaaccattttattttatctttcaaaatctgggacacctgtgccaatttttgttccatgagacttccttgctctccatccttttttctagagcaactgagtcaagattcggtagattgagagcaaacagttgcttcaatatagataataccactgaagaactggttcactaagccagggtgaaacacagttaacattttgctggacatacttcatcttttaatttttttttcttaatttcagcagcaatacaagttactgcaaaaaatatattgaaaaacacagaaaaatagaaatatttttaaaactccaggctgggcatggtggcttatgtctgtaatcccagcactttgggaggccaaggcgggtggatcacttgaggtcaggagttcgagaccagcctggccaatgtggcgaaaccctgtctccattaaaaatacaaaaatcggctgggcgtggtggcaaacacctgtaatcccagttactcgggagactgaagcataataatttcttgaacctgggaggcagaggttgtagtgagctgagatcacagcactgcactccagcctgggtgacagagtgagaccttgtcttaaataaataaataaataaaattttaaaactccagtcatttcatctgctgaaggggacggctactgtaatttttgtgtgtcctttagattttctttctaaacagagacagggagagggaggagaaaagagtgtcaggttcaggttttacaaacaaaaataatagactgtatgtattatctatattcatagactcattagggaccttttctcaaaggattttaatcacaaataatcagagaacctagaataaattatttcattttgcatatatatatatatatatatatatatatatttttttttttttttttgagatggagtttcactcttattgcccaggctggggtgcaatggcgcaatctcggctcaccacaacctctacctcccgagttcaagcaattctcctgcctcagcctcctgagtaactgcgattacaggcatgcaccaccatgcctggctaattttgtatttttagtagagatggggtttcgccatgttagccaggctggtcttgaactcccgacctcaggtaatctgccggcctcggcctcccaaagtgctgggattacaggcatgagccaccacgcccagcccattttgcgtacttttaaatggtgtccatctgtgttctgtgtttttcctgtggtttgtcacggcctctgtcctatgttctacttttagcttgatagctggtaagcattttttcacccttctccttagtcttcattgtcataggttctgatggccgcatccgagccccttattctgaagcaccagcaggtattaacttagaaagccgagtagcagcgactctgtgggccccagcgtcaggatgcttcccctccggctgctcgttgccagcgctgttgttctgtgaacctgtgtcactgtcttggccttgttcctctgtaaaatggcagcagagtcacctccttcctagcgctgctgtagacgttaagtgacgtgagtccagtccccaggcctgtgctggcccttgggcaccaccctgctctacaccactccctaatccttggcctgggccgcttgtctgcagagttgctcttacctcggctgtggcagggacctctgcagaagtcctggctcgggagtagtcttttagtgtgcaccgtgtcatttctgtagggaaatgcctagaagagaaaaccgtgggagaacaggccgacttcccgcttttgttatgtagtactgccctcccgctttctgaaatgaccatccggttggcaaggcctcccacgatggccaatggaccagaggatgcacccatttccccacactcatgacagcaaggaatgttataagcctttcaatgttttactgtgtcaggtggacataacatagcatcttgtgattaattatatttttattactaaagcaaatagcacttttccatgcaattttcccccaggagaccaacctgtctatatgtataaccatccatctccctcttattaacaaaaattcctagtgatttggtgagtatatccacaaaatggtaatctatgccgtgaagcatttctgcagtgagaaatgctagcctctgggccagaactgttagtgagagcccgcagagcccggccctggcttttgctttcctgtctgatgcgggtggagggcctgggtgatgggtgcaatggccctgagcacccaccatctggagaggaattatcaccgcagatcaccccggggctgggtgaccctccctcctctgcacacccccaacctccacatctttcccaaagacgtcaagggttggatttcaccgtaatatgacccagagatgtaaacggctgctgatgctgaaacgctagagtgatatctggtgaaaaaagaagcatccttccagtggaaggctggcaaagctagggcaacagagggcgagcccccaaagtgccaggagggtgtcacctcccgggaaggccagccccgtttccctggtgctttggccacatggggactcagtggcacaggaaggtcgttaaacaactatgaccaggtcagtagcatcctgaagtttacttttgtttgttctgcaatgagctgtgggctggtagatcattttcactttttgctgctctattgacggaggcaaatgcaataaaataaagtcatggatatgcaaatcaaacggcagtgtcttttctaagatttacagaggatgtcacacacttcagattgaccaaaaacatttgccttttattctaagtgttttccttggtggggagaagagaaatacacacacacacacgtgcacacgcatgcgcgcacacacacatgaggccaacatttagaacttacataattaaagccatttttttcatttcattttctctattttcctagatttgtagggaaaaaaaacagtacaaagagaattttattccaatgattgggacaggagtgatgacttaacaattattgctctggaacaaaatgtaagactgtctccttggaacataaggacagacagaaccagggatggacagactggggcggtgtctttcaaggtgtacctgcagaacagtgagctgcctgccgtcagagacacggttgtcacagccagcattactctgtcatattcatggaattctgttttattactctttcagaatactgaaaaagaaaaataatttctgttagtttttctgtaattagaataatttgttttttctgaaacatgagttatggaaatgatgtttaaagactgagttattggcagctaaaatcacttcttcttgaaatggctgactgtgaaacacacagtatcactgaaggtatttctttaaaaatagtatgttaaattgaaagcaattatcaagaactaaatggtgttcaggtcctacaggtttttaaatattttatgttttttctaaccaaatgcttctttatgtaggaactttaacttaccatccatggccggcacattgaaataccagcatacagtgaagactaacacttatcaacaaccagaaatatgttcacttacaagctcagagcttattgtaaatgtttcttgtcatcttgaatggctgcacatgtgctgactccataaccctagctattcactgcatttataatttcattttccctaaccagttcctacttctaaccactgcctttaaaaatcaaactagcaacaccaaccaaacctgaaaaaaaaaatctccctggtgctattcatttatccttctcctcctttacttcgttaaatacttcattggaatgtattagctttacattaaaagcaagtaagatgcctgaaaatttggaaattttcatcaccatatatgaaaataatgacataaattataatttagagaaccaaaaggattttctaaaatttgaaactgcattatagcaatgttctactattattttcctactagctctagctacttatttgggacattaatgtgttattgaaatagaatgtttgctccattttattttttaatatgaatttgaaatctttatgaggaaaatatttagaactgagatattttactgtataaaagaatataattatggataatagttgatgaataagcacaagtaactgaataatctcaaatagtataaatgtgtttcctacattttaagtttaaatcaaaagttaccaattctcaaatacaaaacaatagtattttggagaaaaaaatgactaaataagtattatctctaggaaaaggtgcagaagttctaaattttgatgaagcctaatttaacaatttttcctttcctggttattgttttctgtggcggtgaggaggggcttttgcctttatatttatttctgaactatttaattttttttcagtgagaatgtgttctttcattacttttgtagtgtctgtaaagttttgaatgaagcagtcatatattcccatcacgcaggtcttgggaaataaagaagaaaaatcttttctagttctgtcatgaagtcccccatggcccatgcctaatactcactatggtcaaagcatttgggtcttttttctttcaatttaaataaaggttaaccattctctgtataatttcaggaaattaaatgagattggcagattaaattaaatgcatacgcattaactggtgccttttcctaatgtccttccaacaacttgattggaccagaccctcagcccacagggtcggtgagagtggatatggtgtcaccctgcaacttaagaaagtcagagtcgaaacagataaacaccacaacatttttataatgtaaagaaaactgagcaggttctagattcttattacatcatttactccacacacaaggcatgattgaaaaatcaagttaaatcacccttgtaatctcatgggcaccttatggcctacatatgccctaagttccaccttcaaaatgtcccttaacttgggcttaaaggtttagctgtttgtatgtatgttcctaacatggacagaagaggctacttcatacctgcttgtgcattcacacatacacatacctgcacatgtcttttactggataagcgggtatttgtttaattctgagagacaagcaatgacataattaagtgcccccatctgagggatgacagcagttgattctattccttctgggccctgctaatggcctttctccctctggcctgctctcacatgtcccaggggctctgcctgtaaataattaatggtgactgttaatgtgtgttgggaagtgaagctgccttattcacacgtataaccgcttacacaccaagccttttcccgattcctcttttcaaaagcacacagccaagacacaataatctccactcagacacagcaattctgtgttggcatctcaggaatgatacagattgtgtgtgatggtcatccatttacttggattttcaggacgattgcctttgaaatggagcaagtcatggcttagcgtgagttgtaaagaccctggattggtattaggggctttgctccgtaagcagcttgccttttttctttctgcagagcaggatttttcctgggagcaggattttccaaagggagctctttggtggcaagagctcataccttgtgtcatatggcaagccatgcatttggagtatagacattaggactcatattttctcccaacattttgttatgaaaaatttcaaacatacactaaagtagaaagaattgaaccatctatattcatatacctaccactcagatcacaccattaacactttccaaaatttctctcttgcctttctatccaaccatccactcatttttaatgcatttcaaagcatattgcaaacatctgtacacttcactcttaaatactgtagcatgcatagtatggactaaggttcaatattgtttgtagtttttttaggtaaaatatatataaagtaagatgcacatatcttaaatggactgcttgataagttttgacaaatacagcaactgtgtaatgaaaactccagtgagatatagaaccaccaaactgatgtccttgtgccccatccacaggaaaactcactgtctaccatatggccacgatccacccttctgattttttttcactatatcttagaacagcatataaatggaatcatttttgtacaaggtttctttcactcagcattattttttttgagattgctatcagtctttccatagatcaatcggtccttcctttttattgttgagtagttactgtaccacggtttgtttattcattctcctgtggatggacacttgggctatttacagtttggaaatatgaataaggctgctgtgaatattgttggatacatttctggacatatttctcttggttagataagaatggaatttatgggtcacagggtaggtatacatgtagttttataagaaaccaccagacctgtttccaaagtgattggaccattttgcactctagccagtaaggtatgaacattctggttgctccatgtcctcaccaagtagtgttggccttacagttttagccattctggtgagagcatagtggtatctcattgtggttttaatttgcatttccctgatgactaatgacattgagctttttgaatatttttttgctgtttaaatctttgccctctctctttctttcttccttttctttttctttctttctttctttttctttctttctttctttctttccttccttccttccttccttccttcctcccttcccttcccttcccttttcctttctttctttccttccttcccttcccctttccttcccctttccttccccttccccttccccttccccttcccttcctttcccttcccttccttctgttttgtttttttgagacagggtcttgttctgtcacccaggccagtggagtgcagtggtgtagtcacagctcattgaagccttgacctcctgggctcaagccatcctcctacatctcagcttcctgagtagctgggactacaggtgtgcaccaccatgcccggctaatttttaaaatgttttgtagagacagggtctacttgtttcccagactggtctcaaactcctaggctcaatggatacacccaccttggccttccaaattgctgggattacaggtgtgagccaccaggtccagcctgctcattttcaattggattgtttgtctttttattatggagttatacgagtttttatattctagataccatttattttcagatatgttttgaaaatacgttattgtagtctataatttgcctatttaactttaaatggggtcttttgaggggcagaagttttaaattttgatgaagcctaatttagcaatttttcctttcctggttattgttttctgtgtcccatgtaagaaagtaagtaaagacttactctcaagtcatgaagataatctccgctatgttttcctagaagcttcatagttttagcctttatgtttaggtccatgattcatctcagttattttttcttttttttcaagtttttttttcaagttcaggggtacatgagcaggatgtgcttgtttgttacataggtaaacatgtgccatggggatttactgcacagatcatcccatcagccaggtattaagcccagcatccattagctattcttccttatgctctttccccaccctccctcaccacaggtgcccagtgtgtgttgttcccctcttgtttccatgtattctcattggtcagctcccacttataagtgagaacatgtggtatttggttttctgttcctgtgttagcttgctgaggataatggcttccaactccatccatgtccctgcaaagtgataatcttattcctttttatggctgcatagtattctatggtgtatatatgtatcatattttctctgcttttttcttcttttttttttgagacagagttttgctcttgttgactaggctgaagtgcagtggtgctacctcagctcactgcaacctctgcctcccaggttcaagcgattctcctgcctcagccttcataatagctgagattacaggtgcccaccaccacgctgggctaattttttgtatttttagtagagacggggtttcaccatgttggcctggctggtctcgtactcctggcctcaggtgatccacctgccttggcctcccaaagtgctgggattataggcatgggccaccgcatgagccaccgcacccagccaccacattttctttatccggtccatcactgatgggcatttgggttgattccatgactttgctattgtaaatagtgctgtaatgaacatgtgtgtgccatctcaagatgatatttgtatatggtgagaagtaggggtcagggctgctttttattaaatgagggtgtccagttgttccagcactttttactgaaaagactttgcttttcccattgtactgctttggctcccttgtcaaaaatcaattgaatgtacaagcacaggtctatttttcaaccctctgttctgtcccttggagccatttgtctataccagtaccatactgtcttgattactatagctttgtagtttgttttttggaaggataatggcttccaactccatcctttccaagtcttgaaatcaggtagtgtacattctccaactctcttctttttcaagattgctttggctattctaggtctttcaaatttccatataaatttaagaatcagactgtcaatttctatcccgcaaaaatgaccctattggaatcatagttgggattattgaatctatagataaaatcaaagagaattaacatcttaacagtactgattcttccaatccttgaagatggatgtcttcccacttatttaggtcttgttcaatttctctcagcaatgttttatgttttcagcgtacagatcttgcccatcttttgttacatttttttctaagaatgtaattttatactatcataaactattttttcaatttttcaatgttaactgctattatgtgattcatttttgtgaggtgtatgtttgtgagccaaccgtgctatgcatttacatttaaaaagaaaaacaaggccaggcgcagcggctcacgcctgtaatcccagcactctgtgaggctgaggtgggtggatcacttgaggtcgagagtttgagaccagcctggccaacatggtgaaaccccatctctactaaaaatacaaaaattagctggacttggtggcgtgcacctgtaatcccagctactcaggaggttgaggcatgagaatcacttgaacccgggaggtggagattgcagtgagccgagatcgcgccactgcacaccagccttggaagcagagtgaaactgtgtctcaaaaaaaaaaaaaaagaaaagaaaaagaaaaagaaaaaagaagaagaaaatcaatccaaagcctgtcttattcatcctttcagagaggcagcacaaagatgggttgggtttagcttgagagctgggagaccaaacttctgtcccagtttgcctctactggctgcgtgaacttggccaaggatgatagtgttgaagtcaaaataaaaatgtagaggtgaatttttatttttattttttatttgtacacatttgtggggtgtatgtgacattttgttatgtgtatatagtatgtggtgatccagtcagggcatttagggtgtccatcacctgaatacagtacatttttgttaactatagtcaccctactctgctatcaaacattgaatttattccttcttactgtatgcttgtaccctttaacccacttctgttcgtcctccctgctccgacactcacccttctcagtctctgttagctgtttttcccatttttccagtctttgcctccatgggatcaaatttttagctcccacaaataagtgagaacatggaatgtttgtctttttgtgcctgcttatttcactcaagataatgacctccagttccatccctggctgttgcaaatgacaaaagaattttttttttttttagacagagtttcgctctgtcacccaggctggagtgcagtggtgcgatctcagctcactgctacctcaggctcctgggttcaagtgatcctcgtgcctcagccacctgagtagctgggattacaggcgcgtgccaccacacccggctaatttttgtgtcttcagtagagacggggtttcaccatgttggccaggctggtctcgaactcctgacctcaagtaatctgcctgcctcggactcccaaagtgctgggattacaggcataagccaccacacccagcctcaaaaggattttaaaatctaatgttttcttgggatataagaattgtaatttgggatatatatatatatatatgagagagagagagagagagagagagagagtgtgtgtgtgtgtgtgtgtgtgtgtgtgtgtgtgtgtgttttggtatgtttgaagaataaagagaaggttggcagttttgtaataaaaaggagaaatgttatgtgtgtttttcaagaaaacttattagtattagcaaggttttggagagttggcaagttatgatgggtgagtgacagttgtgggtaaagctagttttaaagtcgttttagtagttattagataaaactggttttagttgtggtaggcatttttagtagtcggacttgtagagaatcatgtttttggagtcatgttatatgccccgagtgctttttcttcttggcttctcagctccgttttagttgggtgtaaaaacaataacccaatttgcttggtcacctttcacaacagtattctttccctatttctgctatcactccacacagtcagaattcaactgctcatccatcgcagtctttccgtaatacctatggagagaaagctttttactgttgttccctaacctctttggaaatctggtagaagctttgaattttgtcctcgaaaaactgtacacacacacacacacacacccagttttgtgtacaattttagggtgttcagggaacttcggaagcctgtcagcctttcggggtccacaggccctcactgtgaaccccttctagagtggaagctcggggagggcgagaggccgccttcctttccctcggctcctcctgcacccagcgagggctcggcctgccgtggccgccccgtgagtgaccgccgcttttgctgaacggcccgggcgctgggtcgcggcctcccgcaaggctggcctctcctcccgagtggcagcaggtgctcggatgaccgggagcagcccacgctctggtgaagcagcgcgacccgaggcccggtgtcgtcccccatcgttacgcagcgcgttcgtgccagggcaggtctggagtgagggcggctgatttaaatcccacgcccttcgtggggttttctgggcagggcgggaaagcgtctggatgtccacacccccgggaggtggcctgtctttcccccgtgggcaccgcagcgggacagcgtggctgagacccgcggctctctcgccaaagcccctgcgcctccgctgctgtcggcgaggtcggcccggccgctcccccgcgggccgctgtccccggtgccctggaagggctccaggtggcggtctcgctgcagaatcctccgagctgcgctcgccgcccggtgccttcgcagcggccccggttgggttgcgggtcgcggggcggcgagcgcagggagcgtcgcggggccacccctctctcttcctgaagcccccgcgatcgtgcaacgggccgcgccgcctcctgctgtgttccacggtgattctcaagagcacgcgggcagtgggcggtgacgccgtgtgtgtgtgcttcctcccgcgcaggtgccggggacacgggcggcaagccgtccacgcggggcggtgaccctgcagcgcggtcccgcaggacggaaggcatccgcgccgcgtacaggcggggagaccgcggcggcgcccgggacctgctggaggaggcctgcgaccagtgcgcgtcccagctggaaaaggtaggggagcgcctgcccctgcggccacccatgcagccccgggctggacgaaggggaccgctcagatgattttctcgttattgtcataacggtaatgggcgtttttactgtgttctggaaacgcctcgctttgcgtataaacttgtgggcgcctttcctttccaactgacttctcagtctgatatcacctaagcaggcccctgccaccttttcatgggaggcctttgagggacgggggtgtggtcacttaaatgtaaagaacaaaatgccacccagaggcttaacctactctattcttttacgtttttgtcgttataaaaagtagcacatgctggaaaaataaaatttagaaaatatgtcaaagtaggaaaaatgggacaaaaaagttaccaaattcctgatacaccctaaaacccacttaacagttttgctgtattttcttccagcctgccgatctgagcatacatggttgttgttgttgtttctaatatagatgcagacagattgcatatatggtgatgcagctgctgctcgtacttttataacattattttaagaattttccagatgattaaaaattccttgtaggcgtctccttcaatggctacgtgacactccatctagagggaccgtgtctacctggctattcatcttggctgatattaggattgcttctcatctcttactaatataaacgatgctctattgaatgtttttgcctcattcttttcttatggtaatgttattttcttagcatagatctgcagggattgagaatgtggatatgaggacttttaaagttttggaatacatgccaagctgttttccaaaaatcttctacagattaaccctcccagcaaaagttggagtggaccatcaccacattttttgcccctgtgggggcttcttactggctattatcatgaaaataccttaaggatgttttatttgcatcactttgattaggacaggcttaacatgcctccatttaattgatagttagaattcattcaattcctaaaactccaacctgttctcagaagtgtaagagattgggagaggggcagtacagcatgcttgggaattgttaagcagaaggaaggcatttaagatccctctgattaggaattcatggtggatatggaaaaggatcattcttctgcacagagagagctgcgctgtgcacacgagcaggtcagagctgtgggctcctcgggtgcaccccagtggcctcaagcagggaggagctgggcagcaaacacagcctggcatccctgccaagtggccaagcagccagagatagtggctcattccagagctgtgcagattcagggatgtggcagcagcaggagatgctgacgggggaagatgatcatggagagacctgagagccaagggggatgtgacttcatcctgagggtggaaaagctgttaaaggcagtggcatcataatttggcaaagagcactctggcccatatttgaataaaggaaaacagagtccagggtgtgtgtctcttctctgtggcatcatggacagtggcaactcaaaatcgagaaggttcctagaaagctgcctctcccctgaatacaggactgatgaaatcccagctgattggactttgagaagacagtgaggaaaaggatggatacatctgtgttttcataaaaatgtaaaattatagttccaaaaaataccataaataagagtcaacggttgatgcaaaaggagaaagtatatggctaatacccttcattgacaaagagcttttacaaatcaatatgaaataataacataattttcaaaagggcagcaggacatggaaacagcaaaataaaggtaaagaaagtagaagccatgaaactgtaaaaataatttgaaagttttgaaatagaaagcaaagtagaaagaagtagaaatgaccactaaatcaaaaattggttctttgaagagattaataaaatagaaaatctctggtgagagtaaaagataaaaaagaagaaatagataaatcaggaatataaaagagaacttcatgacagtttatacaagcattaaaaacataataagagaatgtattatgaacaagtttatgttaaaacactcaaaaatttagatgaaatgaacaaataaaaagaaaaatttaactttaaaaagaaacagaaagcatgaatagtctttcaaccatgaaggaaataaatcaatcatgtaaaaccttctgacaaagcaaattctaggtctacatggttttactggtgtgttctaccaataatataatcacttgtccagaaaatagaaaaagagggtgcactcacctgttcctttaatgaagctaacacaacctcaataccaagagtaggtgagaacagtacctggaatgaaaatgactaaggatatgaataggcaaatagacacacacacatctgaaagatattcagatagatggtacacatatgtaaagttattcaacttcgttaatgcgtatagaaaggcaaataaaacaaaaatgaagcagcctttttaagctaatcagattgacaccttaaagtttgataaaaatcagaaggaaggctatgggaacttacacacctttattcaatgctactaggaaggtactaggaatgtgtgcagcctctttggaaggccatctgaaaatgcttgtcaaattttcaaatttcattatctttgacccagcaaaactactgctaggaacttacccctacagatttacttgaaaaaaaattaccaatttgtatgtgtaaggatgttcattcaagttgtgtttaagatagaacaaccttgaaaactgcctaactgttccatccacaggagaaggctgctacagaaatctcagtctgtcctggtcctagaataccacacagcactccaaaaggacaagataatctctagcagctgttttggaaagaactccagtgtaacttaatgtaataagtgcagaacttctgcttccgggaagatggagggaatatggaggttgtttactttgccctcttcttctcactaagtgcactgaagctctagacgttacatgtaaaacaaacgtaggattctaaaaggtagagaaaagaaggcagagtagctggtggcctcagtactcaaggaaatcacaatagtacgtttttgggttttatttgtatctcatacatcccaaaccagatactgaggaagttggcaatccagaaacacaaactggcacagagaaaaaaaaaaaaaattccaaggaaagcctgctctctccaaccaaagcaccaggaaaggaacagcaaagccaggcaggaaacttacaggcagtcaacaaccctcttcggcaaaacactgaagaaatatacttgcagcccagccccacccctcaccagcaagggccaggtggagagcttagatttccacccttgccaggctgtaacaggcaccccaatcatccccaccccacggtgtcagagaaggctgtgaggagctggggtgctaatccccaccaggtggtgacaacatcccccatcaccatcagtggacagcatgtggggagcctggacttctgtcaccacccagcctggcagtaatgagacatgcattccccatctaactagggcagaattgaagcaggcctagaggagaacctgaagtcccaacgctgcccagcaatagcaaggagcccctgcttactgggtgtcaactgattctaagtacagcccccagatttccaccccaccaggcagcaatgaaggggcatccctgtttacccaccagagtggcgtcagaggagacctgccaacacacaagattgaagtaagatccagagtcttaaaacataaagacccaaatatccaggccacaataaaaaattactcgtaattaccaagaccagaaagatcgcaaactcactgagacaagacaaccaagagatgccaacactaggatgactccaatgttagaatcatctaacaaggatttgaaggcagtcatcataaaaatgcttctgtgagcaattataaatacacttgaaacaaatggagtaatagaaagtttcggcaaagaaataaaagacatgaggagagccaaatgaaaattttagaacttaaaagtacaatacctgaaattttaaaattaaaaaaaaactcaatgaatgggctcaactgtagaatggagaagagaggacaggggaaagaatcagggagaatacagaacagtagaaattacccactctggaacaaaagccaaagcaaaagaaaatagactgaacaaaagaacagagcctcatggacatgtgaggattttaacagaagatccaacagtcatgtcatcagaatcccgggagactagacagaaggcaagactgaaggagaactcaaagaaacaatggctgaaagcttctcaaactggcagaagacataaatgttcagattcaagaagttgaaaacaaacaggatatgcccagagaaatccattccaagctcatcatagtcaagcttattaaaactaaagacaaaacaaaataaaaccttggaagtagtcaaagggaaacattgcctttaggggaaaaaaaatccaaaagacaaaaatcaccaacgtcagaagggaaacacagaacatcactacagatcctgcagatatcaaaaagataataaggggacattatgaacagctctaaacacatacattggacaacttagatgaaagggacaaatccttgaaaagtagaaattacctcaacttaataggaaatgcataatttgaatagccttttaactattaagaaaattcaattcataattttaaacttccccaaaaaataaatttacaggttcagatggcttcactggataattctacctaacatttaaagaattaataccaatgctacatagtcccttctagaaaatagaaaagggaacattttttaacacttttatgaaggctgtattaccctgacaccaaaaccaaagacagtgttaaaaaaagaaaagtacggaccaatgcccattatgaatgtggatgcaaaaattcttcacaaaatattagcaagtacaattctgctatatgtaaaaggaattataagccatgaccaagtggaatttattccagagatgcaaagttgcttcagtttcaatcatcaatcaatgtaatcctccttattaataaactaaaaaagaaaagttaccttatcatatcaattgatacagaaaaaaattgacaaaattcaataccatgtttttcaaaaactcttagaaaattaagaataggagggaacttcctcaattgggtaaagaatattgacaaaaacctacaactaacatcattcttgatgttgaagactgttttcccctgagatcaggaacaaggcaagaatgtccattctcaatataatactgcaagttctattcaagagcaactataatatcattgtatttaaaaaatactattcaatgtatttaatatattgctggcaattctagccaatgcaagaaggcaaggaaatgaaataaaaggcacacagatatgaaagaaataaattaaactgtctctatgtgtggatcacatgacaatctatacagaaaatccataaaagaaatgatttatgaaagaaaaattggtaaactggacctcaccaagattaaaaacttttctctgagaaatacctaagacagtgattctaaaaaaagctacagactgagagaggtatttacaaatcacttatctgacaaaggactcatagctagaatatataaagaactctcagaactcaacatgaaaaagcaaacaatccaaatagaaaatgtatgagatatgtgaagagacatttcactgaggaagatacacagatggcaaataagcacatgaaaagatgttcaacatcgttagccattaggaaaatgaaaattagagcaatgataagatgtcattgcacagctttatgaacagcaaaaataaaaaatagtgacagtaccaaattcagattgggatgcagagaaggggtatctctaatgtgttgccactgagaatgtaacatggtacaatcacgctggaaactagtttgtcagtttctttaaaaaaactagaaatacacttatgaaccagcaattgaactcctgaacatttagtctagagagaggaaacttacatgcacatgaaaacttgctcatgatgtgtcataccaactttatttgtaatggcccaaaactggatacaaccaaagactctcagtaagtggatacttaaacatatatggagtactactaagctatacaaaggagctctcctgaaacacgcagcaactcagatggatctcaggacattatgctgatttaaaaaaaaaaaaagccaatctcaaaagatcatattctctatgattccatttatgtaacattctcaaaatgacaaaattttacaggtggaagagagattagtgtttgtcaggggttagagatggtgaaaaggaagagaatgagtgagactaccatgggtgcgtggcatgagggagaccttttgatggaacaggtgatggaacaggttcgtatcttgattgtggtagtggctactcaagtctacatgtgtgacaaaatgcagaactatatacatacattgtactaacgtcaagtatcttgctacaattatgtaacatattgccatcgggggaaactggatgaaggatactagggttttctcagtactatctttgtaacttcctgtgaatctctgattatttcaaagcaaaaagttaaaaaaaaaataggtaaagtataattccacttttacagcacttaaaaactggcaatagttaatctgtggtgttagaagtcagtatagtggctacacaccatagggcagttactagaaggaacaaagagggcttctgggcacaggtgatgtcctggtctttggactgaggccagttacatgggtgtattcaaatgccttgcatgaaactgaacatttaaaatatttgcatttttctgcaggtgtgcaggtgtgttatattgttgattaaaaggtcataatgaattaagtgaaaaaagcatttggttgtatatgagattacctgtgagtactataaataaatatgttctggaaggcatcctttgcagagggcgactgggaggtaaaggcatagagagaggcctacttcctgttttatacttttctatgctgtttgaattttttcaaatactcactatggagcctccagccagaaagccagctttcaccttttccactgtctgggtccctcttggccttgggctggctcctatgacgtcacttaccacctctagaggatggggcttttaagcctctaaccgaccgagtctagacagctgttagttgtgggcagtgaagcatttaatcaatcactgtggcttttatccataatgcaaatgctttcctggaatgacagggctactgggcctcaccctgggcagagtggcaggtgggtgggcttttcttttctgatcatattgaatgtatgagtctaccgtccttcacctgatcccagccccttagactgttcctctcctcacgtgtcagacatacctcccactgccagcccattcactccactaacagaacctgagccttcctccaagtcccatgtttccaggaagtcttggatgcaacagagactcttgggctttagagctagacacatcccagttcaaactctgagtagttctgctgatgataaactccctaaccatgggcaagcttttatttcctcttccataacatagaaatacaggcacattcctggcatgactgttaggaggattgaatgtggccatgtgaataaagtactcagtccagcatctggcacctggtgagagctttgataaatgttcactccctttcctgggggctccattttacccattcctgcccaacttacctaaaatgatctccaaacacacttgtgttataaactattcagcaagtcaaatgtgcttgtcgggggctgtttatgcatattcccacctcaaacttaattgtaaatctgtggaggccagaaatggcccctggcatcctcagtgcccagtcccacctgtcacacacagtagatcctcagtaggtgttgatgggggcactcgccatccctggcatcctgagtgcccagtcccactctcacacacagtagatcctcagtaggtgttgatggggggcactcgccatccctgtcatcctgagtccccagtcccactctcacacacagtagatcctcagtaggtgttgatgggggacactggccatcccattccaataggggatccccatctacctgcttgaccacactgatgttcaagcccacaggaggcagccagcttccaaaggacttgacatttcagaaacgcaatcaaacacttgacatgccaatctagcagctatctgagcatccttttctcagacccagagagctcgtgataagtcaaggccacttttacactggtcaatgatagccacttactagctatgtggtcttgggcaagctctgaagcctctctgaacctccacatccttgttcatatattaacacatggccctcctcctgggacctttacataccagaaggactggaatgagcaggaactcaggcttaggtccagtttccaccatatcctttccttcctctgggccaccaagtcaagagtccctctgcatgctgctggaggatctttgtcccaggattcagatctgtgaagtcccctggtgtgtcacattccatttatgaatacattgcaggatggttcttcagagagctggttcccttcccccttcgcaaggctgacttaacatgtaccaagtggttactgagctctggctctatgccagaaggggctatgcacaccgtccccttcctcatgaagcaggtagtcgagagcagcaaatgcgagccacatgtatatatcatattttctagtagccacattaaagcagtaaacaagcacacacctataatcacaggtattccggttggaggatcagttgagctcagaagttcgagaccagccctggcaacatagcaagatctggtctctacaaaaaaaataaacaaaattagccggtgtggtggcatgtgcctgcagtcccagctacgcaggaagctgaggcagggggatcactttagcctgggaggtcaaggctgcagtgagctgagattgcactactgcactccagcttgggtaacagagagagaccctgtcaaaaaaaataaataaaataaaggagcaaacagaaacaaacaaataaaatgttaatattatttaacatgaatatattaaaatcattgtttcaacatgtaatcaacataaattattgatgagctagcttaccctttctgtactaggtctttgaattcacgtgtgattttatactctccacctctcacttctgaggagccacatttcaagtgctgcccagtcacacttggcaggtgctgccgttctggacaacacaactccagtcctgctccgggacctggtgaagggtttaacgtcagttgtcttggcagttcctaatagagccagtctcactggagccctgttctgttttgaccagggccagcttctgagcatcccggcagcctatggggatctggagatggtccgctacctactcagcaagagactggtggagctgcccaccgagcccacggatgacaacccagccgtggtggcagcgtattttggacacacggcagttgtgcaggaattgcttgagtccttaccaggtaaatcacagggcatgagctcttaaccgtgtctcagggcaccctcttcttaggcttcaccccaaaatgtttacttcttcatgctttcaccaataatgagatcaagaaatacagggtaggccattgacacccaaacaaagtgaagcttgcctgccagccacattccacctctcactcccatgaactcataagggaaattctcaaacaccatatttcataaagaatgtaattaacattgctttttaaaaaaataattaatagaccttggtctttttagagaagttttagatttatggaaaaaatcaattggaatgtacggagttccagaattaatgatttggaggtatgttaacagaaaacaggtgatcgctaaatcacttacacaagaatatctaggtaagagagacagtaatcatgctagtaacttctattgagatggggacgcatcagtctcaggaggcaggtgctatatttcagaaccatggttttaagatgacgaaaacaaagctcagagaggtgaccctccactgtgcgccctccacatggttttccctataactctgttttgtgttagtgtgggacatttgtgacaactgatcaactaatattgataccttcttactaactaaagtccatcgcttacgttgcaattcattcttgctgttgtatatcccatcggttttgacaaatggataatgacacgtgtccatcatgacagtattacatagagcagtttcactgccctaaaaatcctctgtgctccacccctcccctggccccatccctccctccctccctccctcccctggcccctggcaactactgatcttttttactatctttgccttttccagaacatcgctctagttggaatcccacagtctgtagccgtttcaaactcacttctttcccatagcgatatgcatttaaggtttctccatgcctttttgtgacttgatagctcatttcttttaatggctgaataatattccattgtattggtgtaccacactatgttgcttttgtaggaactatttttttctctggtgaactcaagatgtcctggtctcctgtaatttcccgtggtggtcttggctcagaaacactgcaccagtctaggcaggcatcgctacagctatagggtgaggcacaccctagccatggtctttgggatttgagattttgcttgggagccagggcccacctcttgggtgggagaacatgcagtcacccagggccctgcacctagaagggcccacgttacgtttaatactctgtactcactatcttaaaatgtttcatgatttttaaacaagaagccccattcttttcattttgcattgggcctcaccccttatatagtggtcttgtttgagggtttccagctgtgggctttgatagatctgtgctcagcgttggttccaagctagtgttcccctcatgtgtctgaacagaatgaggttatgggcagaaatcagggcaattttagggcccatgagaagcatactaagacaagacataggagggcagagaggagcttgggtgctcctgaggagccaaaggctgacctgcctcttctcggggagccccaagattagctctgttctagccctgaagagtctgcaccagctgactccgtcacctaatgttagctaatatttattgaatactgtcaagtgctgaaaactgtgtagaacgtgagagacagataatttttttaaagattttcccagccatttagtacctcctggccaagcaggggaaattgaggcagaaaggagtaacactgtgcaatgtaactacactgaggttgaagtatttttacgcagaggtctgggagcacacatcagggggcagggtagggtctccgaagggaggctgacatctgacctgggctttgcagagtgaataggagtttacttggcagacaagtgaaggaaggacttgggttgcctgcttttgcagagcaggaagtgtggctgaacctcgtcatggttttcaactgctcccaggagcatcgtatcttcagctcaactctgagcaaagctgctgaggactgaaggatttcagaccattgtggtgggctttgcagaaagtgcagagatgggcaaaacagtgtgtacccatccctgcacttcctgcaaaggagttcccaagctggaagggaagtcagccatggtcaggagtaagtcaagacaagaagacaaacaagagtcaggctggacatgctggctcatgcctgtaatcccaacaatttgggaggccaaggcaagaggatcacttgagcccaggatttcatgaccagcctgggtaacatagtgagaccctgtatctacaaaaaaaaaaaaaaatttaaattaaccaggcatggtggcacatgcctatattcccaggtacttgggagggtgaagtgggagaatggcttaagcccaggagtccaaggctgcagtcagctatgatcacattactgcactccaggctgagatagaaggagaccctgtctcaaacaaaaaacaaaaacaagaagcagctagagaacaaaggagggtttgagaagaagagggatgagaggttgatgggatgcattctttgaagcacgttgttatgtgattcctggtctctgaagctgagcagggaggaagaggggctcctctgagtgtcgttggccttaggctgtagagagtacctgtaggggttttgtgtggttaagagagcaccctttgattttagacaaagcaaggtttaagtcttgaccttgctatttactaactgtgggaccttcaagaagtttccctgccaggtgtgtcccacagaccctggctgatggatgaaatgagtactcagacacaggtgtacggtgtaagagcagctgagtcactgcctggctctgttggccagagagcagcccgaagaagctagagctgcttgctttcattcagtgcaggcacaatgccgaaaacctggagccaacacaacctgtaggtaattaacatttattgttcccctttcagggaacatcaagccagcagatgatcaaaggtcagttcctggtcaacataagtaaacaagcctgtttaagatacattcccctacactccttgccctctgccttcagctgttctcccccagggctctgcagaagcttccaaactttcagaaggtttgtgtcctttccctgtagtttttcctacgactctgaccaatctcctacatttccaaacctctctgagctttggtttcctcatcttaaaatcatggtcctgaaatataatgcctgcctccaaagactgacacatccccatctcaacagaagttactagcatggttactgtgtttctcttacccagatattcttgtgtaagtggattaggggtcacttattttctgttaacatacctacaaatcattaattctggttaacagtagagggagaagaagggatatttacttggcactggctccagcctcagccctatgctacatgctttatttggtgaatacagggccatcctgaccccggtttcctgatcaatgtcctgtcgcgaaggagagagtcactctctcctcacttgggagcactttgatccctaggactatgtgcctctggaaatgaggcagtgttatgatgcatttgggaagtgtccctgcagaagatgaggtcatttttccatggcaactagacccaaaagatattgcactattttgaacttgaagatattgtaacatttcagcccacactgcccccgtcaattcaatgtgctaagtgttatttcatcctggaattaagtaggtggttctactggggagaaattgtcacttttaggcctgacagatctttcaccaaagcttttattattattattcatgaaagtaatatatgtatattatagataattttaaaatgtgggaaagtgtcagtactttaataatacaatgacacaacatcatgagttagggtttattgatccaggcacttgacatgcattttgtgatgtagtcctcacattaaacttggaagaatgagtattattattccgattttaccaacaggcaaactgaaacagagagagattaagaaatgtgtccaaaattacatactaaattattttatttctaaaatgcctgtctccaaagttcatactcctgcatgtaatgttaccctaggggaggggtgagggcaggggagagcccagagaaaataccacaatgctggggtagttgtttctagtcttatttccacacacccattttttatttggctaagatcatgctggatacgccatttttaatcctccatttcatcactcggcattatctgacaagcaggtgggtgactgatgtggggaaatgtcatatgcaattcagagagactattccagaaaacactatcaactcaacagaagcaactttcagctggaaacaggacagctgggttttgttttgttttgtttaacttttactttaggttcaggggtacatatgcaggtttgttacgtgggtaaactgcatgttgccggggttcggtatgcagattatttcgtcacctgggtaataagcatgggactcaataggtaattttttaaccttcccccttttccctccctccaccatcaagtagtccccagtgtctattgttcccttctttgtgtccacgtgcattcaatgtttagctcccccttataagtgataacatgcagtatttggttttctgttgttgcgttagttcacttaggataatgacctccagctccatccatgatgctgcaaagtacatgatctcattcttttttatggctgtatagtattccatggtgcaaatgtaccacattttatttaaccagtccattgctactagcggtctaagggaagagcagagtgggaacaaacagcacccttcagtggcactttccctttgtcctgccatctcctgccaggtccctgcagtccccagcggcttctgaactggatgctggccttggcttgccagcgagggcacctgggggttgtgaagctcctggtcctgacgcacggggctgacccggagagctacgctgtcaggaagaatgagttccctgtcatcgtgcgcttgcccctgtatgcggccatcaagtcaggtgggtttccccactaccctgagtcaaccctgaccgtgcaaaccatctcagcctccagatgtgggactgtgtctttattctcactcttggctctcaaatcacctctgtgaggagacttttgcaactcctgttctatgtttctttttcaaaatatctgcacccttcctcatttcctccttacttgcccccgcaaggggatttcagtgacagagactgactgtggctaatgggactgttgtacgaggcactccaaagggcaaagccccacagaaattctcccactaacagaaacttgatgcaccaagggaagtaaatagagaagtccaacatgcacaagtaccttttcagtttccattccacatatcagagtctgcccttccaacgactgtgacactagcatctgcatgcccttagctttttggttttgttcctttagggaatgaagacattgcaatattcctgcttcggcatggggcctatttctgttcctacatcttgctggatagtcctgaccccagcaaacatctgctgagaaagtacttcattgaagccagtcccttgcccagcagttatccgggaaaaacagtgagtagtcactgcctgtggagtgtgttttagttccttttgtgctgctgtaacagaatcctgcagactgggtaatttataataaacagaaatatatttggcttacaggtctggagattgagaagtccaagagcatagtgctggtatctggtgagggccttcatgcagtgatatgaaggtggagggcaagagaccaacagactgagagagggaagaactcacttttataacaacccaccctcaaaataacaaacccacttccacaataacaacatcaatccatttatgagggtggggccttcttggcctaatcacctcttaatggtcccatccttatcacaacagcaattacatttcatcatgagttttgaaggggacattcaagctatagcagggtgggagctgaaatctgggcttcatccccctcccagagtttttgtttttgtttctggttttttttggttgttttttttctcttttccttttttcaaaaattggttaaatatatcatatttaacatatttcttttttaaatttttatgtgttaaattttaaaattactaaagttatgaatgattgttataacaagtgatcacaattgagagtggtaatcaaaattatgaatcttctgcccttgaagtaaatagtttaacaacctggtagggatcttttcacatccttccacatgcaatgctataaaaacatttacaaaactatacagggtttagttttaatttcccattttaataacaaaaatattattgcgttatttacattgtcttcaacttggctttttaaatttagtattctatcatggacttcctctagatcagttattgtggcttcaactcattcttttagggacgttctttaaatacatagagccagtgtcacttagttgacatagctctcctgctattggtggacatttgaaatagttcttttttttttcctgttgcaatatagcctgatttgctatggtatgtttgcttatgtagagcacagtcctaaaagtgggctgctttggaaacactgccccccaacactctggtgattcacattttcaccagcaataggtgggattctctgtctccacccctcagccagcaagcagtaggcatcctggagcctattaattttcatcagtgtgaggcaaaaataatttctgcttattttaatttccatgttatattagtaataatactggatatcttttcatatgttcatgaactatttgcattccctttatgtgaactgcctgttaatgtttgttgattattttttctaaaggattgtttgtctttttttctcactttggagggtttttttttttttgaacattagagatttttaagactttatcataaatgttgccaatatttttcccaatccattatttttctttttttgttatcttttgtgatagcaaaggtaaaataatacataattcaatatgttcatcttctcctttctggtatgtggttatacaagaaggccactttccctctaattttatttcagtattctcctggagttccttgtaatgttttcattcatttagtttttacattttaagctttaacctttctggtatttatttgtgtgtattgtatgagggaagtggcagagggtggaggtggctagcttttatctcttccagatagccagctactctagcacagtttttaaaatgaagttttctttctcatctgaattgagatgtcaccattggcattttccccagtacctatatctgtatacattttgggattctcagtactggttcactggcctattaatctgtttctggcaaatgtcatattgtttcgattataggcactgcatttaagttttacaatctgttaatgcaagttttctgttcattagtttttttcaaagatatcttgactggactattatcggacatttgttcttctattttgctcatttcccacagtgactctatttgtgtagcttttatgttctttaatgagatttttttcttttcttcctaaaactcctggacctgtcttgtctgttagtgacttttatattgtttttgctaccattttaatgaactatctatatatttatataactcttttccatttctattccaacctgatgttactggtatggagaaaagttattttgtttatttctgttttatccagttcctttcccatcttctcttattcactctaatgtagtttttactagaattcctcaatacttttggatatatgatcacatattctacaaattcaaaacaagtttatctcttttttctaatatttatacaacttattattccatgtcttattgtgtatctttagaaatctcaaaaactgaataatcatgactctagcagttatatctatcttgttcctgattttaaatgtcttggtgtcaccaatttataagcatttgctctggacagttagcaaataggttcttgttatatttaggtagtttccatgtattcatttttgctttgagtttttattaggaaacattactgaactttttcaaatccctttttgcagcaattagtgtattcatatagcttttctactttattgatttaataaatgattttgatagatgttgactcaaccttgaactcctattataaatgctcattgtctttttttaactgctggatttgatctattgatattttatttacagtttctgcatctgtgtttataggtgaattgatctataattttctatttttaatgtttctatgtggttttatataagatgatgctagctttacaaaataacatggggaactttccatcttattattatctggagaagtctcacaggaattatttattgttaatggttaattagataaagcagatctttattttctgattccttttgaagtcatttgtcaattcacattgtctgctttcccttatatgcaagtcaggaaattatattttggtagaaaattatccatttcctttaggtttttgaatttgccatcataatgttgcattgacatttttctcattcttttcttctatatctatacttatattactcttttcatttatgctgttgaacagttttactttttctctttcaaacttaatcaaattagccagagatttatgttaaaatacaaggaactgtcaaggaacttgatagattttttaaaattacttgttttgtttgttatttcattaattttcacttctgtctgtattaaaaccctcttcatatggttgtttttggggttttgttttgttttgtttctgttcttgttttttgagatggagtttcactcttgtcacccaggctggagtgcaatggcgtggtctcagctcactgtaacctccacctcccgggtccaagcaattcccctgcctcagcctcccaagtagcagggattacaggtgtgcaacaccacaccaagctgatttttgtatttttagtagagatgggatttcaccatgttggtcaggctagtcttgacctcaggtgatccacccgcctcggcctcccaaagtggtgggattacaggcatgagccaccgtgcccggcccatatgttcttttttgagagttttgttgatggtgttgaggttaaagcaaggccttggcatgagacttcctggttcttatctggactccaggcttcagtactgcagggccttcgtctgtgtcttggtttaatgggaaaagcaataaaatacctgtctcagagggatgcttgacaaataagtgtagtaatatttgtgacatcctaatagcaaagcctggcacgtagcaaacgcctaatagatgttacctgtttcttgagttgaatatttatttcttcctcctttttctctaattttagcttgttgattacagtatttgagccctttatgtgctgcctgtttgtgctagctttctttatcagagcctgaaatatagatatagagatatatagatatatagagatgtacaagtgtacatacatccatcgatacaagtacatatatttatttcccacttctgatgatttttaaaatctcattcttcttatgtctctacaaggttttgcttgacatacctggtttctggctttatgactcatcaatacctattttggttatatcaaatggccaccttaatcctgttgatgtctctgtccttgaaattgagtttgttttctcttcacgtgtccactttgccctgtttttctttgtgtcaaccttggataagttttcccagatatttattttcaggtttttatttgtctctttgccgtaggtatatttcttgtaaacagcatttggtttttaatctcatctgagtgtgtttcttttgaacgagggatccacccacttcatatttgtgtacaacctgtcctattagtatatatttttccatctctttaatttatatttattactatttcctttttacccttcccttattcctgctggtttcctagtttctaaagaatactgatattctactttctgtatatttctacctatctgttccttggttggttttctcagttataaaacagggataacaatgcccttcacagggcagctgtgcacttagcacaggccctggcacataataagtgctcaataaatattagttatattgctattagccgcacatcaccaaaagaaatgatgatcatctaacccttacatctatgtagtgcttgttacttttccaagcactttcttaactaatttggtccttataacacctcggtaagaactgcagggaatagcatctgttttacatatgaaattattggggtataaagacattacgttatttgtccaaggatgacaaatactaaacagtattgatgcttagactcccgaacacagttcctgaactgtaccgcctaggtttcacatagacgaatgattctctgcacatcataatccctgggaactttttaaaatcctgatgctcagaccacatcttacactgattaaatctgaatctgtagcgtgagacccggcatgaggagttttagaaattctccaggtgattccaatgtgcacccaaggtcaagagccagtggctccgattttcttggtgtaagggtaaaagcagaaacagctgttatcttctacctgtgatcttttctgtgaggcaactcttcttacacatgccaaggttggcatagagcatggaggaagcgattactgcattttgtgaatgaaaagacaaggaaaaggcaatggtgcttttcctctaactggctctgttgcgtggaatcagaagaggaaatgaaatttcagcgcaacctgagtctcaagggctccttgagcttccccaaagcaggtggtatttttagcattcaagtgaatttcagaggcaagtaccttggagtgggtgtgcctggctgccccgtcatctctaacctgcaacagcacattccttcggtgctgctggcagaagagaacagagaggggtccgggcagagggttccggcagtcaggaaggatgactcaggagccagaggtaagtgctcctaccttcccaggtatccagtgggattaaagtgacagtttgggttggttcagaatattacacaagggtaggtattaaaagggtgcttcactgacatgacacatggtctgaaaaggcctttggcactgctggcactcatggctgtgaccttgttgaagtaacggtcccttcagggcacgtgtgacggaggttgttgctccagccctggtacaacaagcagtcacgggccacgcgatgatgtcttagggagatcatgcatgtgccatcgtgttttttgtgtggttgagctctgcctgacacaccagctggtcagtattttttaatgtaattgctgcgtgtgtggaagccacagccgacccaggtacagcagcccctctgcatgtttctgggccaagcatagcccgaatccacctctgcccgcaaagggagaaaatacagagaaacccacatttgttttccattggcagtggctggctgcttgggttttgctggtgtttggatgaagaaggttccagaggccacactgtatggtctggactgctgggacacactctctaagaaacaaaagtgaagtaaagtcagacctggccatgctgtttgcctggctgggcagtgctcctcttaaagctgctaaagttttgcctgaacatctaatgagacggcccgcgttcgtggtgaacatcgggtcaatgtttagctgcgttgccatgagaaatagcttaatgctttgatgttgtcacacccagaaaggaacaagaaaactcagaaatgccaggaaaagcctaatcagatcccagaataaccacgatgttcgctcctgttcagcagttagagggccaggctgagggctcactggggctgttttaagtgtggaagtagagcagacctgaaattaactttcaaacaacccaatggggaaattattaatttccttttaaaagtctctaatgatttcaaatctggcagctaacctaaagagagagggacatctattattactgtttggatcagttccggcatatgtagctttcaagttcctggtgccccacccttcatgtctgtgtgtcagtgccctgagcgcaagcagcccagctgcacatcctcagggttaaggcaggcgttttactggggccatgcaagctgctgctggaggcagctgagccagggctgcgtgctcatgagagtgcctgatggctgggggctggtggcctttcctgagggacacctgaggcctctggggaacaaccctgtcttagataggacctcacatttggtgcagagggtgtcactccagagtttcgtgcattgcagagcacttccgcacacatcaccaccgccctggcgccacataccctcttctcagcaggcggtgctgctgtaggagccaacgtgggcactggcattcccagaattcagcctggcccagcaaggcccccatggtgacagccagggctggggcatggaccctgactcctcttggcctggcctgttccacagtcgctcgtgtgaacagaagaggaggcccttttcctaccctctgagggtcatgaagtaaaccctggactgttcccagcatccttccaccagttccactattcttgtgtcctggtgagcagttcagtccattgtcccacacatgcccattttctccaggttccaaatactgaagctttccctgtcctcttcctctgcccatatgttttccctgtggaataggagacaaatgtgatgctatccatgtgcatgttagtgcttcatagaactcgaaaatgggtagccagggtcacgtggcagaataagtgaaggggaacagcgcgtggcttctcagtcctgtgttcatgtcgtcctgctggattttaagacatccgacaaagcagtgagcatgtcagtcacttgtatttagttaacgacagagaaaaatgattaagctagacaggcagaaacagaaaaactattatttgaacttcagtgacaaactagaagacgtaatgagaaaagaataagaaagagaataagagtaagaaacattagccaaggctgtgagaactgttggagttcagcacagagatttagattcattatgatacaaatggattctagacaagttagcgttaagctttgaaaactcatcagaatatgcatatctatagatatgattattaatataatcatatctatagatcttatatctatagagacatatatatatttaaaagcatgtttatcccagttataagagggagatgactgcctttcaatttctaaacatatatgaagatatatgatcagaaataacatgaacattaaagcaaaattatttatactaaaacataattttaaaaagaaaagacatggaaaatatttcggaaaaaataactgacaaacacttaaatccaaggtagatcattggtgcaactccatgtcagctgatgatcgaatttaatttagccaaagtttatcgatctcctgccagatgcttgggacccagcagtgatggccagacctttgccctggctgtcacagtgctcacagattccagcaagtaaaaatttgagagaatgaacagttaatttacatataagaaaacactggcagtaaatcatggcatggaaacatacacaacatcactggcaattacagaaattcaaattcaaacagcttgcaagtactgtcacacacctattaaactagcaaaaataaatatacacaatgagtaagacatttggcagagcacagagcaacggacacaccagggtcttgctgctggcactgtgaattggttccatatgtgtggaaagtaattggcatcatgtggcaaaagctataaacctcttttctcccagtgaactgttctgaattcaatatttcctttctgaagaatacctctaggacagaattcaaatgaaatcaatagtgatggccacaaacatggccacagcactgctgtttatgataagaagacatgggggaaagaaaccaacatgtctgctgggtgcggtggctcacgcctataatcccagcacattgggaggccaaggtggtggatcatctgaggttaggagttcgagaccagcctggccaacatggtgaaacccccccgtctctactaaaaatacaaacatgagttgggtgtggtggtgcatgcctataatcccagctactgtggggctgagacaggagaatcgcttgaaactgggaggcaaggttgcagtgagccgagatagtgccattgcacttcagcctggacgacagaacaagactctgtctcaaaaaaaaaaaaaaaaagaaaggaagccaaaatatctggtggcagggaaagactataccatccatgctgtaccagcaagcagaccacgcctagccaggaaaaagcgagcctgcctcctcagcactcagcactcagcacactgctcctcctcgacccaggacaccctgcagatccccacacaatatcctcaggaaagccttccttaaccctcaggcctggtcacttgcccccaccccaaccttctatgtctcagagctccctgtcagttttattcaaagcactaaacaaagtttgggttatttgtttgggtgacattcttctttaatcaatttctccacatgactagaagcttcctcaaagcagaaaccttggccaattttgctcaccctgtgtttgcccctccgtataggacttggaacacgatagataggtgggtaggtagaaaatggatgggtgggtgggtgggtgtgtggatggatggatagatggatagttgcttggatagatagatgggtcagtggatggttgcatggatggataggaggatgatagatggatgaatggatagaaggatggatagatagatgggtgggtagacaggtgggttgatggttacatggttgcatggatggatggatgaatggatggatagatagatgggtgggtagatgggtgggtggatgattgcatggttgcatggatgaacaggtgggtgggtggatagatggatggatgaatgaatgggtggatggttgaaatttttgtatgcagtaacctcctttctgtttacgtagggcctcatagctttaaaaaagtactttgccaaacattgtattttaatctcttatacagcctgtgaggtggaagttttgtctttatttacaagttgagaaaactgagggttctctcgaaagcaagttaagtagcttagttaactgcagacaccatatttttatttcttgcatttttttccctctttcaaatagctattggcaaaattcctaagctggaactagtgacaggagatttcttgtaagtttcctatttttaaaagaaatgactgaaatattacagaaaaaagtacaatgttgctttttgttttaaaaacctctctacctgttttttaagaattttagcaaagaaaaagtgatgaattttactaaacacatcttttggcattcacttgcttaaaagagaagctcagtttccctttctctgatagggtgtgctgtgctcctccctaaattactgtcacgcccttgtctttgttcagaccctacctggccagagaacttaactctctgagtttagttgtagctgattaaatattttgttgcagttttgtatccatgtgcgtacatgtaattgggctggaattttaatggcccttgcaaagtaactggttttgactcataaaatgaaatgagtcctgtattaaggaaccacttacataacataggaactatttgttatttgaaatatttgactgggaaaaaattatattgaattaggagacttggggagctgattctctattttccttgtttgtttcatacaatgtttgttttttctctgatcgtgtcactgatgatttttattttggtaagtaaatctgacatttctacttccagattgtttgcctagagtctggacttgtagccacagattgttacaacgactgtttagtacagattgttacatgttgactgtttaatatatgatcagaagtgtatcttgtaagttatttttgtacttaggtttctcatttatctggtttcaacggtaatatttcctttctttgtttaaacatattggcagccaaccactaattctgatatttacaatattttttaacagacatgctattgtcaaaactgacttcattgttttatctcattcagtcttttatttaagtgggtaaacccctctaagattagaaggaaactgtcccccattttcttgtctctcctttccctactccctgtggtggttattctcaagtcctttctgaaattctccatttacatcatagagtcctcacaggctttccccaaatttaatagctgatttttctgtcattgtcattaccttttaaaattacatttctaatctacttagcaggaatgcttttggctttctaagagtctgttccttgcctttccttttgttatctgtgtgatcatgaccataatctgtgtcaatggaatgttcccagctctctggtcccaacctcccctctcttcccttgactcattaccatctgaattcttagaactgctgtaacaaagcacccaaaactgggtggcttaacacaacagaaatgtattctctcacggtcctggaggtcagcagtccacggtcaaggtgttggaagggtcggcttctcctggaagccctgagggagggtctttccctgccccttccagctgctggggactgctggtggtccccaacacttctcggcttgtggccacatctcccccgtcatctgctgtcttctccctgtgtcttcacatcgtcttcccgttgtctgcctctgttcacgtttctcctttttcataagaacaccagtcatgttggatgatggcccccacaataacctcattttggctagatgacctctgtttttaattaaagtcacattccgcagtacggggcgttaggacttcagcatatctttttggagggacacactgcaacccgtcacaccatccttgctgccttcacttcattgcccttggcctggatccacctgccatgggccaccttagatgccaggtagacggccagtcaaggtacagtgtcctcatcctcccgttttcaatgcctcctttctccttaagagcttgtctctaccagagtgcaggaacttgagaagtaggtgtttagaaaacccacaatgaatattcctcctgggagcagagatgaggcacagtttgtttggttctgttgtggcctttacatgcacaaggatgctgggacagagctgctgtctgtggtgtttccagttctctgtcactgaatccctgtcactcagggccccgtctgatggtctgagttcccagagttctctgggaacctgtagccttgaaatttaccttcagcttgtgggcgtcggtgcacagacgctctctgcagccatcgtctcatctctactataatcactggcgtcatgcagataacctgggatgagccttcagatgccatttctgggcctgctgctctgagcatctttgttttcagggcttcttttggcattttctccaggcctttgagtgagtctccccattttagattaggttcattgattttgcagcttctttggctgttcagttgttcttattgttacttctgcgtatcagaatgtggctcttgtcttactggctggttcaacaaggaggaggcaccgtcccaggaatctttgcttaactgcagaaagaaagacttggggtttgtatgggccaagaattgacaagttcaagaactttctgtgtatttccccccattgtaacgtgtgtcttcattgaatagatacctattaactgcttttactgtggtgtgcccttttgtcactgagctatagtctgtgctctgaagggatctacggtttctaggggggaagattcttactcatgagccataagcaaaatactgaccaactgacaggaacaaggagctgcagacacaggaagagctatgaattctgctgtggggtcagtgagacctagcaaggagctaacattacaacgtcactccggcaaggctgctcttgaccccacagaatcgtacagaggaacacctgtgtgcatatgtcacaggggccaggaatcgttttcggagtctgccctgggctggggtgccagccacatctgctgaggttcaaaccaggctaaaagctttgtagatgccagctcttcattgaacaatttttttcttcaactaataggtttgcactgatataaaaacataagagatgtcattgtggggcaatgcctcattcactgtgacaattttatggctaacatctccaagaagcatcatgtgaaggtgtctagcaccctcctgaacagcagcctccatcaccagatgaggagatctttcttatacatcagtctctaatgaagcagttgcccttaaatacacctaatccttcttgaaagcaatccaagtcaccaccactgccgtggaaaacaagtttctgaaatcattgcactgagccttctcgagaaagtggtacttccttttacttggactgaaatttaaagggctcatgcttgaaaaaccaacatgaacacattctccacctgtttgtgatagggtgggtggagcttaaccactcctgtgttgaattgatggcttctccttaaccagctgtctttgattttgtagtttagccttcatggataggattatataattgctggctttgctctctcggaatcttgtttattgtgattctgcctggactagacacaaataaataatgagggctaatgagggcttcagggctggaagagttaggttttaatgtcaagtgcatgaacatctttttatttatttattttttattttgagatggaatctggctctgtcacccaggttggagtgcaggggtgcaatctcagctcactgcaacttccatctcccgggttcaagtgattcggcctcagcctcccaagtagctgggactacaggtgtgcaccaccacacctggttattttttcatatttttagtagagacagggtttcaccatgttgtccaggctgatcgtgagctcctggcttcaagtgatccacctgccttggcctcccaaagttctgggattacaggcatgagccactgcgcccagccctggacaacttttttaactgtgcattttttctagtttctctctgccactttgtggacacctgggcaccctgtaatgtctgtgcttgaacaagaaaataacttttgtaaatcagttttcagactagccccagaccaggtagaaattgcacaggtttttcaacctccatccagcccagaaaccatttccaagcatgtctattttccgagtgtcaacatttttgcagacttctgctttttaccacttccctcccagcttgagtttatcagatgtcagtcctgcagaagcacagtgggtatgtgcctacagagagctctgggaacaggcaacatctgctttctccaagaggagaaaggaggtccactctaagggtgtatgcaaagaccctctgtattattctctttttacactgctgataaaaacatacttgagactgggtaatttataaagaaaaagaggtttaatggactcacagttccacatggctggggaggcctcacaatcatggcagaaggtgaaagacacgtcttacatggcagcaggcaagagagagaatgagagacaagtgaaaggggcttccccttataaaaccatcagatctcatgagacttgttcactatcatgagaacagtatgggggaaaccgccccatgatttaattatcttccaccaggtgcctcccacaacacataggaattatgggagctacccgtaattctctatctccttcaggatgagatttgggtggggacacagccaaaccatatcaccctcttagctccaggcccagcccaccttgtacttcccatgttgtcctcccatcttggcccctttggtcaccatggtaacccacattccagtagggaggcgggggaggtctgcagccccagagcaccccagcagccctttgagcacatgggccagtcagttaccaacagcacggctacacccttgtggtccccaaaacccttcctacaaatgtcaatgttgggcctacttgtgagccctgcagttgatttatgaacaagcagtttctgcactttgattggcagcttttccttggcctcgaattcccctgccctgggagtgtgccccttcccctaatttcttttacccagaataaattaaccccacaaatcactgccagtaggaaggcaaagggcatcgctatagatcagaggctgctctgggtgggcagggagaagctatgaaagaggcaggaagacataaagttggaaaagtgggttggagccaactggggggctgtcaggctgcaaaggagggactttggatgttctgctaaaggcggagtgggctagggagagctgaaaggtcttgcgcagactttgatatttcaggatgattgatctggtaagaagtgcacagagtggatagcttgcaggtcttggtggcttgaatctcttcagctcacaaacactgatttagtgtctgctgcatagtgggtatgaggttgagctgcagaggcagccaggcagggctctgcactgtggggtgtgcagtccgggttccggttggccatgctgtctgccacagcaaaagaaatgtgggctgagtcagtgccacacagatcagtggagaggttaatacaaagtgtctcaagctgaacagagcccaaaaaagtgctcacctccactgcggcttgcccagagtccacgtggagttagttaagcagcctgaggctgagcccctgctccttctgcagttcagggctccagccccagctcaggggatgtggaggaggtgctgagagggaggctgccattgtaaggacagccacacctaagcccttccccaaggtatttgtaccataattgggtcatgttacagtaataatttgattacttgctgttgttttgtttattttatgatggtccccagagttttatttaaagattttcaatagagacttaagatttgttgtcaaagccaaaaccataaccagcctcccctgcatcttgcatttggctgccatttcagtttgggtaccaaccattccatacggaaagaccataatggccacgcagagtgagtggagagggttggattgcaatctggacaccttgattccatgttcagctgtctggcccttgcccctgagacctgggtgtgtctctgtgaatccaggaaggagaggcagacaggccctgtggagccttttttgacttggcattgcaaagtccacatggtgaccttcctgtcagcctgttgctgggctgactgtcatgcttatccaaagactcctacccaaaggccactgtactttgcaagacgaccaccggaaacaatattgggacgagaactgacctaggcatcatctgatccaagccacttatttaacagattaaaaacaatgataatggaatgaagagtgatacagtcgtgaattgtggattatggaaagatgagggaaaaaaacccctttgctgcattgaattggaggcatcagaacacactcatgttaaatacagagctgtgtcccatcaatgggctgaaaagcagtgacaccccagcggtgatgagcacacctcacacccagatcttggtttctaaataccaatttttgctcaagggaatcaaggcctgggcttagaaagtacaagaggagactggaagatcttgttttgccgggaagtaaggaggcgtcccaaaattgacagcgatatgtcacaggaacacagggggctctctcccaccccagtggggctccccctggacaaattggggatgacttgggtgtcaaaaaaataatgatacttgggaaaaaaaagaatccatgagtccatagtgatacttaaacaggtgaggaggcaatgcttttctatacagaagaatgccaggtaatacatgtagaaagaaaggtagctttagcaaaactttctcattgcaaccaccgttgtactaattgattcaggccaggatcagcaacggaggctaaacccatggggcaaaaggatgcagaaacacagaattgtcacatagtctcagaatatcaccccatagattgtgtactaatcgcaaagggtataatgttaacctttacaaaggagggactgatagacaccaccttaaccatgagaccaaacagggcaccacctgtagcaggaacacctaatatcaggtgccccgggtggggtttagtgggaaccactcaactagactctaaggttgttgcccaaaatagctaactttaatctaaactttaggaaaaacttgagtaaattcagattatgggatattctataagacaagcagtgaaacacaccagcatctgcccccgatgaagaggctaaaagttgcaggacttaatgcaacgacaatgtgataaaaaaaaaaaaaaaaaaaagaaaaggcattaaaaggtgtgaagactcttccagatgaaagaaaagtaaagaaacatacagtgtaatgcagtgtgtgattgcaatgtcatgcaattgtcaagggatcccagatcaggacacaaaatagttataaaccacatttctgggataattgagaatattctaacatgggctgtgaacttaataatatcgtattgatgttacacttactgaaaatgataattatacggctgttgtgtagaaaaatattattcttcagggatacatgctgaagtatttacgggtgaagcatcacgatgtataatttactggcaaatgattcatcaaaacataaaaagcgtgtgtatttgtgtggagaaagaggggcaaaagcctatgtgacagcgttttaacaatcagtgagtcgaggtggagagtgcacaggtattcactgtgtcctagtgcaacttttctgaaatttaaaaaatttttcaaaattaaaatgtggggagtaaaatagtaacaatcaaacaggcccagggcaattgagtgacttgtcttaaaaaatcagctcagaatctaccctcctggcctaagatccagtgccgcccttcccttttcatccatgtgaacagagagacagacagacagagcgacagagtccctcattcctctggttcaaagaccggacggagtgttgaggggcgtaggcccagtctttccaaactcctggagtgggcggaggaggagctaaagacaggcgctcatcgccatctggtggccaaatagggatgcccgtcacctgccgccaatttttgaggaattcatcccacgttattgggacctttctcgtagcctctgcttgttacattttcccatttgcgaagcactaatttttgttcatatttctgctcctctaattttccaatacggatttccagttgcttcgaagaaacagacccaaaagcagatttcttctccccagaaacctgattgagcccaatattcttcggtaatcaggaagaaagagcaaagtcctgctcccatatatttcgccaggtccctttgaccaccccatgccggaaaaccgctggcccttctgactccctctggtggaaataaaggaagaccagtgagaaatgagtggagcaaagacattttgtttagcaggacttcaacggcaagagcgccagccaccaggacttgcgtgtggcagagacccacaggctggcagaggagcgggagctttctagtgggacaaagggaaggcctccggggcctcctgccgggaggccgttgtcgtggggaagctggggggcctcgctgcaggctgggcatcctatgggattggtaggggtgcaaagttggctctctcgggttggtcctaaatggaaagtgaggacaaaaattagagaatcggtcagttattaaccaagtcctggccattttagactgacttttacggaaatgatggcttagcttcctgggttgttactagagataagaagtggctcatgcctgtaattgcagcactttgggaggccaaggtgggtggattgcccgaggtcaggagtttgagaccagcctgagctcgacgaacatggtgaaacaccgtctctaataaaaacacaaaaattagccgtgagtggtggtgcagctactgaggaggctgaggcaggagaatcgcttgaacccgggaagcggcggttgcagtgagccgagatcgcaccactgcactccagcctgggcgacagagcgagactccatctcaaaaaaaaaaaaaaaaaaaaaaaaaaaaaaaaaagaggctggcctcctgcaagagactggcttcccgggctgtttgctatagataaagaggttggtttcctaggcaggtcactgtgggtcgtgggccagagttctgttttttatatattgtgtggccatcgtctgtctgtatctcaggctcgctctgaaagcagcctgtccaccaagcaccctggcgcggtgcgggcagctgcaggcggcagctcctctgatcacaggaaaggccgccttgaagggaggtcagagacttgggtttgggagtcagctttcttctccagtctgggggaggcgcctggacgcttcagcggtctcctctgtacgtggacaatcccgccgcgctcttccctgtgagccgcctcttgaggggcggcactgagcccgcgcccaccggcgccctctggaggttggagggtgacttgcaggcgctgtgcacagattgcctgtgagacgcaggtgccgatgggaacaggtagctcttctgcacccaccaccgtggcaggtgccggcggccgagaaggacatgtgcaggcctcttgggacccgggctggagcaggcacacagacgcgcatttgcattaacccttgctttattccaagcccatgtgggccctgaactcaccctccacatgtgcttttcctttctttccaccaccaggctctccgtgtgaaatggtcccatctcagactgccctgggtagacctagactggctcatagacatctcctgccagatcacggagctcgacctttctgccaactgcctggcgaccctcccctcggttatcccctggggcctcatcaatctccggaagctgaacctctccgacaaccacctgggggagctgcctggcgtgcagtcatcggacgaaatcatctgttccaggtggctccccggggtgtgaccggagccgtgtgtgaccccgctgtcaccgttgtgctcctgcacatgctcccgggttgtattttgtggttttgggggaaaaatgttctggctaaaataggagaaggagttttgcctaccctgaggcaagcctccctttcaggttaaaacagagaggtttagagagatcatttgtctggcccaagtttacacagctcacccggggacatgcgaatgcttgcctgagatgcttgtcttggtcctgcccaggaatcagatgagggcagccaaaccttcccacactggtggatgcaatggggctctgaggcaccagcttttactctgccttccagggaaagtgggaagggcctcagagaaagggttaactctgcaggactctggcagcaggtggacagtgtgggcagtccaggcttgcttcttctggaggccttggagggagacctgagccttacccctgagcttgcatggaaggaggaatgaccttagttgatttctttattttttatttttatttttattttttttgagacggagtctcactctgctgcccaactggagtgcagtggcataatctcggctcatggcaacctgcaactccctggttcaagcaattctcctgtctcagcctcccgagtaactgggattacaggcacatgccaccacacccagctaatttttgtatttttagtagagacggggtttcaccgtgttggccaggatggtcttgacctcctgacctcatgatccgcctgcctcggcctcccaaagtgctgagattacaggcatgagccaccgcacctggcctgatttcttttggacacataactgcaagtcctcattccataaagggttgaatcgatttttaaaatgaaaaaccaaggctctaagtgaagcaagagtcaagaatgttggaaagagcttggggtaggcattaatccatgggactcccaagtgagaacgggaaagaagcctgcacaccagaacttaaaaagcaagtgccgtccaagtgaggcccttcacctgggccagatggacaggtccagaaggttcaaagccctgctctgtggtctcagcagctttcagggaacctactcattttgctattacatgcctgcgaaggattcgaatccctgttggtcagtggagccagggcccaccgatgagaggtttgtctttatctacacaggacacagtaagagttcttcaaaagaattaaaaatcatatgcactacattttcaatgcacactctttaaccttgcatggggagaaaaagaaaaaaaatacacctcttggtttatagaaaaatatgtaaatttggtgttttccctctttattctgatgcctgccttccttcttctccatcgcaggctacttgaaattgacatttccagcaacaagttgtcccacctccctcctggattcttgcacctctcaaaacttcaaaaactgacagcttcaaaaaattgtttagaaaaattgttcgaagaagaaaatggtatgttttctcatcaacttgagtgaattagtcattttcttcttggtagggatatttttaccaattcatactttgggtctttttttttttttttagccactaactggataggtttacggaagctacaggaacttgatatatctgacaataaattgacagaactccctgccctgttccttcactctttcaagtccctcaattctctgaatgtctccagaaacaacctgaaggtgtttccagatccctgggcctgccctttggtgagtatcacaccaaaagtcatgaaagccacagtcaactctgcctctcagctggcctcagagagccctcaggtgcattatgtcagttcatcccctcagcagcgaagccgggtagaagggcccggttcccacattgtaagcatcgtcactcagcatacagcgaggctgtgtcccaggcagatgactcacctgaaagccagcctgcctggctctgggttcaagagccacccagcaacacccacagaactttacccagggacagctttcaccctggcacaggacgactcatgcctgaaaaaaggagggttcagttcttttaggacaactatcacataagagtaagaaatcaggccgggcgctatggctcatgcctgtaatcccagcactttgggaggccaaggtaggtggatcacaaggtcaggagattgagaccatcctggccaacatggtgaaaccccgtctctactaaaattaaaaaaaaaaaaaaaataagctgggcgtggtggcacgtggctgtagtcccagctacgcaggaggctgaggccagggaattgcttttaccggggaggcagaggttgcagtgagccgagattgcaccattgcactccagtctggtgacagagcaagactctgtctcaaaaaaaaaaaaaaaaaagcatcaatctgcactcgtagcactgctgattaaatgctgtttttgcatctggggaattttgcttgttaaaacagatggaatagcatgaagaatgtgtgtgtgtgtgtgtgcatgtgtgtgtgtgttatggctgttggttttaaaccaggaaactcttcatcactggcattatcattcctagtttggccattcgtgtaggggaaaccagcttctctctccagtgtggtcctgaattgttccattatttccaaggacaatgggccggatgttctggaatgaaggaaaaagaccatgagctcccccaggaaaccccattcctgtcccttccttggagtaggggcgggaggacaaggacagtgagggtgtgcagccttccagcaacactcagtcatcttcattacaggacattattgtaatggtccatttttaacatcaaatttggaaacagtctcaaaggcaccactgcatttaaagagctaactaatatacatttttttttctcgtcaatctcttagaaatgttgtaaagcttccagaaatgccctggaatgtctgccagacaaaatggctgtcttttggaaaaatcacctgaaggatgtggatttctcagaaaacgcactcaaagaagttcccctgggacttttccagcttgatgtaagcctaatagccctttctttctcattttcggcttttgagagaaaattgctccgtgttgcagtgaaatgtatgtgcttttcctgagcttctgagataaatataaggggaaaagatgaagaaaaagttcagctatcaaaaatatgcatggccacgaacagcgatgagggtggcacgtggacagcagaagcagctgtgtcaggtggtggtggggttatggttcgtatccctcgggactttctttaagtccacggcctgcccatatatgaggctgagtggacactgagagctccaggaagggcctttccacggaaccctgtgtgcctaccccagaatacgggtaccttctcgctttaggttgttttaggtggttggcgggtccttaggcagacaggccgtggatcacactcattgcttggagctcagggccaaccccagaaggggccccatcagggcagcctcaccaggggccctgtagtggacccccaggcagagtgcccaggccaccctgcacaggcttcagcccccggtcctgccaggccactgccaggacccccacgggcactcctccaaggcctggtgcagcctcttgtgtgcggcgacccccacaaggcagcgaaggccccttcagcatgtgtatcctcagagaggatgggctatcatgtcctaggctcctgacaagcacagggcaaagccagggacccagggacaggactcacgcttctcagaagaaaggagccacgcggggtgcccccgggggggggtggtcccacatcatactcctcgcagggtactcctggccttcaggccttgtccacagcccctgggcccctgttctgagtctgtcttctcgtatttcacaccaacaactagcaggcttggatttttggcttcccccaaagcccagaagcagcaaatcaggagaggcagagccttgtccagagcttcactgtgggcctgcagggaatgtgtctgctcgaggtctccttctccacactgggaaggggtgggtgggtatgtgggggcttgggggaccctgaggtctggcacatggcagggtctccatagaatttcagcaggagggggctggctgcagcggttctgatggtgggcggtggcgtgagccccttcaacaaggaaggagacaaaagcaccaggaggagagaatttaatgtggggcagcaaacagcctgtggccctcctgaggccgccctggttgtgggcgggatagttggtggctgtggtgatgtcctcaagcagggagatagcatgtctaaggtactcctgcaaagtaaaacgtgggccaggcatgatggctcagacctgggcacggcgactcagaaccgtactcccagcactttgcgaggccaaaatggggggactgcttgaggccaggagtttgaggctgtagcaagctatgatcacaccgctgcactccagcctaagaaacagagcgagaccctatctctaaaaaagtaaataaataaaaagaataacaaaaaaagaataaaacgtgttacaggtgcaaggtagcccctcatcccccttggtgactgggttccctgcagggtctgtttgcagtagggctgagggagggctacccacgaggggcaccccagacatgctgataatcctgaggggcccagcttgggactgtgtcggctagcagagggcatgcggctaggacagttacccttggtggcactgccaccccgtccccagacctgggctggcccaggaggccacccaccaggaggtggcagacaccagcactgtactgcatgccccatgccacccccaccagccgtgagccgttgtcctccaaaccatcagagtctggcactttccccagagagacacaccggtaatcagtactcttaagaatccttaatgctgacagctgcttgggctcctttcactctagaataattgcctctcactgcctttgagggaggagctcctgtagatagatggccccgtcgcactgtttgatatcatttcgtgagtttgaagaggctgctgggccccacacagctgggatctgcgtgaaggaaaattggttggaatcgtttgactgcgcgtggttgggaactgactggctcttcagtctcccctcccttcttgtatctgatgctatcttagcttctctctccctccctctctctctcaggccctcatgttcttgaggttacaggggaaccagctggcggcacttccacctcaagagaagtggacctgcaggcagctcaaaaccctggatctctccagaaaccaacttggcaagtaagcaggggcctctcctccctggccagttccaaagcgtgtgtggggccacggtcgagcaggtcctctgaatggtggcatgtgagtctgcgagggctgctgagccgccagctgggggcttaacaacagaaatcactgcctcacagccctgggggctgaagtccgaggtgagggtgtgggcaggcctggttggtttctcctgaggcccctctccttagcttgcagatgccgtcttctccctgtgtcctgttgcggtcaggcctctgttcacgtctgtgacctaatctcctcttcttataaggacaccagtcggattggattagagtccatcctaatgacctcattttaacttagttacctccttaacagccctgtttccaaatacagtcacattctgaggaattggaggttagggcttcgacacaggaatgtggggggaaacagcccctaatggtgtcctctcatttttaatttttagtctgctggagaatcttgtctctcacttcagcccaatctgtaattctgttcaaaagtctctgctgatcactaactgaaatggacgtggaattgaataaaagcacccagccccaaagccttccaataggtggaaagccgggatgagcccagccagcctctggagaccagccgcccccgttatctgcagaaggccacttctgcagtatcacggtggaacttgcaccccaaggaggacctctgcggggaggggtgggggcagtgaaaaaggcagccgccactgcagcgtgcgcccctgccaggccctgaagagttgcacatgaattgctccctatctccgtggcttggcattataacatcacagccaaaagtaatgcttttgtcgtgctgtcctcaaattttgtctctttttcctccccccagaaatgaagatggactgaaaacgaagcgtattgcctttttcaccaccagaggtcgccagcgctccgggactgaggcaggtgtgtgtgggttgggagacggtgttcccagatgagacagccggggtagcctggttcctgctccaccaaagtggggatcgcccttatcttgggccttccccttcaatgccctgttgcaatgccacagatgtccaagttcaaatgaaaaccctgcatatgagctgcgcccattctttctgtcccacgtgtgacacgcaagtatcctcaagccccactctcctgcgtggaggccagtgatgccagcagctaatatgtgcagctgatctacacaccaggcagtgccctaggcaggttacatatgtgagagtttctcatcctcacaacgtgaggtatgggccacatttccccattttgcacgtggggagactgaggctcccagggtgtctgagcttggctgccacaccaaaataccaccgaccgagtgcttcagcagcagacacttattttctcacagttctggaagctggatatctgagaggagggtgccagcactgtcaggggcttgcgagggccttcttcctggcatccttctctctatgtcctgagatagtgaagagagagaggactctggtctttcttcctcttctttttttttttttttctttgagactgagtctcgctctgtcgcccaggctggagtgcagtggcgcgatcttggctccctgcaacctccgcctcccaggttcaagctattctccttcttcagcctcccaagtagctgggattacaggcatgtgccaccatgcctggctaatttttgtatttttggagatgagccactgtgcccggcccctcttcctataagaacgttaatctcataagggccccaccctcatgacctcatccaaacctaattacagctcaaatatcccatctccaaatagtaattttgtattttaatacaatacaggatgccaggaagaaggcccttgctagcccctgacagtgctggcgccctcctctcagatatccagggtttcaccatgttggccaggctggtcttgaactcctgacctcaagtgatccgcctgcctcagcctcccaaagtgctgggattacaggtgtgagccaccacgcccggcccctcttcttataagaatgttaatctcatcataagggccccaccctcatgacctcatctaaacctaattacagctcaaatatcccatctccaaatggtgtcacattgggtattagagcttcgacatatgaatttggtggggggcgggggacacagttcaatccatggcatagggactgactgatttgtcccaggttgtgtggctgcttctcagtagcagagccaggtttcatcccaggactgtgggacttcagccctggaccagcagctacgtgctgttaagtctctactgccacacgatggtatcttgcaaagcccacatggatcacggccgcctttggacccacaggctgaggtgaggccaaggttgcacaggggctcgtggtcttccccaaaactcaacagagacagaactttcctagtttttgtgctggtcacacaacaaggccagttcagcagagagtacatctaggtaaacaagctctttttgttccattatcttctgtgagacacaggggaaggtatggagctgtccctttcattaaacaaccagctctgcttcttaacctcaaagctacaacttccaaagccagctctgctcacagaaatatccctcaggatgctggcccagaaaaccagaacccacatccaggttgttttaaacataatacaactttcttcttcagtttgatagatggttgttggcaagtacagatagtatgaggtagggatgagtgacgccacagaggccaggacacatttgcaggaggtgaactagggagtttgccgctgctacgctcttggatgaactggtgtgcttgtgtgttgagtatgatacacatagagatctgtcccataagagcgtgtgtatttatatgtgactgaaaaaggaatatcagtggaccagataaaagagtccaaaaatagacctcagtaaacatagaaatacatcgggagtccccagcgccccccaggaagcgaaccggtattggtccctggcctgctaggaaccaggccacacaggaggaggtgagcggtgggccagtgagcatcagcgccacctcctgtcagatcagcggcagcattggattctcataggagcgcgaaccctattgtgaaccgcgtctgtgagggctctaggttgtgccctccttatgagaatctaacgcctgatgatctgaggtggaacagtttcatccctaaactgtccccctcaccaatgctgcagtccatggaaaaattgtcttccacaaaaccggtccgtggtgccaaaaaggttggggactgttattatgtaatatatgacaaaggcagaacttcaacttagtgtaaaaggatgcttgcgtgcgttaataaacggtgttgatattcctgcctggaagggggacaaaacacgatactagattacaacaatcaggtttaagtataaaaaaagaaaacaataacatttaaggaatataggtataactttgctatgagggagatctttaaaatctagttggaaaatccaggaataattttttaaaaagactgaaatcattggcttcataaacattcaaaaattgtgttcagtgggaagcatcataaaccaagtcataatgcaaacagactaagaagaaatatttgcaacacaaattgttgcaacacaaattggcttaagtccctgatatacaaagaatgcttacaaattgatttaaaaaaaaaaaaaaaaaagacaacacaataggcaaaaaaaatgggcaagggatataaacaattttcagaaaaggaagtccagagggccaggaaacaaatgaaaaggtccttaaccacacgaatagggaaatgcaattatgaatttcataactgatccttttataaatgaagagccttaggactgtagaaattgagtccagacatagggatttcacttagaaggaaggggaaacaaacaccatcttctccttcatgccaggcgggatgatgggtatgagaacaggagctagtgtagacctcggtcacgcaagccacttgctgtgtggattagaaacgtgtctccagtttagaaatgccgaatccttcctgggaccacggaggagtgtgcaaggaagtgggctcagcactcaatgagacgccagtggggaaaatcacaggcatgcatggaaaagcaccataggactacgcgcggtaccaatgctctagaaagtgacagctggcagcccgcagaagtacatctggggagccatgtgagggggccgcgcccctgggaggttctctggcagaggtgaatcttggccttggcagatgacaaaggcctcttgattctttaaacttcatctagaaagttgaggcccacacctgagtgaaaagaaggcggctctttgcaaacccttttcctcagtagggttattctcccagggccatggacccttgggtaaggaattatctacaaaagacagcttgtttgcagtaggatagtaaaattccaagtagatttatgtacatccaaatagtcatatttgtgcagtggcctcatccaaaaataatttggatggccgtttttacggtaaaaatcagaccagcagagtcataaataacttatgaataaataattacagttcttaaataccttgaactgtgttctccccagctcagtgcccatcgttttcaacactgggccaggaggtctgttacaggtgttgcctctgtttgcaatcatagctcattattccagccatctcttacttaaagaggcttcataaacaccgtagcgaaactttaaaagtttggaaagcacagaggccaggtgtttagaatgtgttctctggggagaaagtaagcctttctcattatgacgttctttcatgaaaatgtgaattagggcaggctaatattgatcatcttttttcattgaaggaaaaaaaaggaagctttttgaacatttccttacctagcaaggactcatacaaagccatctttagaaggccggtgcacctttatttccgcaggagcccctgcagtgagtcccattcacagtacagctagctgggcagattttccaggcattggttttggtattccattatcggctctccctgaatgttctcagaggccaggttacccattaccattgttattgcagctacatgtgtggaggaaagccagagccgaggcggggtagctatgatcaagggcaaccgagcctggtttcagcccaacaaaagaactccggcttctctattttccatgtctggcagggaaccctatgagagggctttgaggcagttgtttaatcttgaattctccgagctcccaggcatgctgtcctgccccctctccaggccttagtagggaggataaaggcacttcagagattctgctgaaatccaaacctctgattcccatcagtgtgcgtttccaagctctttctcaactcaaatgctctggtgcccgtggaaacagcaaatttgacatgattttcatggtaatctcatagtgagcctaattaataaagtcacttaaatactaaacagttggctggcttttcaaagaatggcattgtaagaagcataaaaacagccaactgtggtatattttcattaactagctttttttcatggaaaaagcaacgcatgtatattttaaaacaccgtttttgaacagtagcaaagggcatgggataaatattcagtcctctagtaattcctttccccagagacaactatggagttcagtgcatctctggtaaccattgtgttcctgtctaacaactgtaacctctgtgcatacacatgtgcaggtgtggtgtgtgtgcatataacatatacatggtatgcgtgtgtgtgcatgcatgtgtgcacacattttctgctacactaataagccttctagatatccggttctgaactttttttttttttttttttttttgagatggagtcttgctctgtcacccaggctggagtgcagtggcacaaactcaactcactgcaacctccacctcccaggttcaagtaattctcctgcctcagcccccccgagtagctgggattacaggtgcccaccatcacgcctggctaatttttgtatctttagtagagacagggttttaccatcttagccagcctggtcttgaactcctgaccttgtgatccccctacctcggcctcccaaagtgctaggattacaggcgtgagccaccagcctggcgcaccttgccttttcaattgatgggtagctcttgagtattacttcatacccccatatatgtagacctgccccatactttgtaatagctgcaattattctattactcattgaaccaaccccctgtggctggacacataggttgttgtagattgtcctctatctctgccactgagtgtcctcattctcacatctttgccacacatgcatgcaaagctatctgtagaatgagaattgctaggtcgatgaggtgagcattttgttctgataggcttgccaaaatgccctctggaggttgcatcagtttatacgcccacctggtcaccacgctgtgacggtccagaattatttttaaatgcagtctgctttgccatgtctttgcagcaagtgtgctggaatttccggccttcctaagtgagtctttggaagtcctttgcctgaacgacaaccacctcgacacagtccctccctcggtttgcctactgaagagcttatcagagctctacttgggaaagtaagtacacatctggaggggccgtgctggctctgctggcccagagaggcagaacgcccatccctaaaccaactgggacacagaaagccaggcagaaagaagccatctactttccaagaagcagtagtgagattttcggaacagggcttgatcaaggaggtggggagagaggaagacggagtagcaatgcaatgatacacactttcactacatcacttgggctgtgatgaggagaaccactcaatcattcatcctttcattactgagctcccattgcatgccagctactgccaggggttctaggcagtgtgcaaagcttgatgagagtgtaaaatgttatattaatattaaagggacatcgccttctcgggaagaggtagtgatcatctttatggggatgtacttagtagcagagacaggaaagttgggggaggggactcaattctaagccgtggggatttgcagaagacagagctgccgtttctatcactgatcctccaggagaaagcctttggaattagtgttgaaatcagggctcaaagtgtggggtctggggtacaggctgcagaggctgacaggagccacgtgtgtgcgtgtgtgtgtgtgtgtgtgtgtgtgtgtgtgtgtgtgtattctctcgtggtggacacatctgtcttcagcaaccctggcctccgggagctccctcctgagctggggcagctgggcaacctctggcagctggacactgaagacctgaccatcagcaatgtgcctgcagaaatccaaaaagaaggtagggcttccgcagccctgtcccctgccatcacctcttggaaagacaactccagtccacttgttaagttctgggggtggagacagttggtgacccatggagcccagctccaggttccagatttgacaagatgctataaaattgtccctaaagcaatcgttactgagggtcactatactgagaaggaccaggtgatacaactgtgacctcctgggcagcaaggattttgtccataggttcttgcctcttagagttcgcttttagggtggttagtgtcatgccttccctccccctgatccagtagtcttccttaactgtccccactaaaacacaaagaaggagttccttcacaacaggattttgtgtcctaagagatgtgagcatgtgcccacgcagctacccttccccttaatgattttgcacaggccccaaagcaatgctgtcttacctgcgtgctcagctgcggaaagcggaaaagtgcaagctgatgaagatgatcatcgtgggtcccccgcgccagggcaagtccaccctcctggagatcttacagacggggagggccccccaggtggtgcatggagaggccaccatcaggaccaccaagtgggagctccagaggccggctggctcgagagccaaggtcaaggatggtctgcgtgcagagtccctgtgggtgggaggaacatcccttggactccttctcccttctccccagagagcccaggattttctcagcctggtgtccaaagctcaggccctttgcaggagccactgtgtaccattccataccagcttctgccaagagcagcgaatcatttcttaatgtgactttgtgatgttttctttttctttacttttcttttttttttttcttgagacagggtttcactgtgtctctcaggctggatgcatcctcaacctccccagcttaaatgatccacctgccctgtatgtttctgttatagttacttgaggctctgggacagtggttcttaaccccggctgtctgttagattcccttgaggggcttttaaagatagcaattcccaggcctcacctcactgctctctgaccccaaggattcaagttcaagtggtctgggataaggcacccccagggctgagagctaaccactgttgcaggcagtgaaacacaccagcatctgccccctgatgaggaggctaaaagcactctgggacttaacaccctgccgtccctgacacctgctttcaccccaggttctgaaaagtcctgtttctaagccctacttaaaatgaatccatcactgcttgaacccgggaggtggaggttgcagtgagccgagatcatgccactgcactccagcctggcgacagagcaagactccattcaaaaaaaattttttgagtccatccataaacttcttaatcatcttgctttccattcagtgccaggcaaatggaaatgaacattttcctgttcatgtaacagagaaaagagccatggactgttggtgggaactccatccctggaatagagcaggggcagttagccctttctctgagctcggggaacgaacacacatagataaggccatcctcatcaactgtatttggatttctgccaccctgtgattcctcgggatccaaggggcaagaggctgcttcactgtggaaaactgaggaggcttgagatccagatggtccatgattttcccccaaagctcccacgcacagtgccaaccaaacactgcagcttcttccacacacaaccactttccaaacctgctttgaaaaagtaggcattgaagctgtgcatctgttctaacacgaacttggaagctggtcctccaaggggtgaagcgctgcctgttggggccagaacaatcaaacacgacaatcaacgctaggccaatcctagaacattccaggagcaaatctagctgactcgagtctgaaggttctctccaggaaccagaatcctctgcattctctccagctttgcctttttcttaacagttatgcaatctcatttcttctcttagcttcctctagctgaggcctgaggggtgaattcgtgcttctatttttcctgaccttcacccccacttcctttctgcgatgattaaaaccccctaccctttagtggaaggacaatcctgtgaaggctgagcccgccgctctctctgtggccggcctcagccagttgagaacagctgttttcatctttatacaaaaccaggtcagcacactgtgtcttggaggctgatgctgcctcacagagatgactcctttctgtagaaaactgcagccttagcatccagggccagactcttacctcatgcaatgatagagaaaccaccgtttacacagccgttcccggcagcccaacagctcatcttttgtttgattcccacagggtgggagggagtttcccagcatccttggtgggcgccaccctctgagccccacaagttcagaggcccatctcctcctcttgccctggcacacagggaggctgaaccccagtgcaagccgtgacatcagagcacagcttcctcccacagggcatcccctacccatctgcagcccagacagagccaggccctctgaagtctgtccagggcctggtctctgctctgctaggagtagacagaagtcccagaagcccacccccatgccaccgggcccctgtccctcgcccagataactgtttcctaagaaacaatagagtgtccagaacttttccacggttgttttttcagacccccgagtccagcctccagagttatccgttgtctccgtttgattgactgaagcctttgtctctaaaatgcctccctgtcgctgccttgttgctcaagtaggttgagtccgtggagttcaacgtctgggacatcgggggaccggccagcatggccactgtcaaccagtgcttcttcacggacaaggccctgtacgtggtggtctggaacctggcgctgggggaggaggccgtggccaacctccagttctggctgctcaacatcgaggtgaggacaccagacgccagccctgccatttcagtgcccagagctttgcaggtcccaccgcttccctcaagcatcccctgtactgagaaaaaaagggggttatgttgccacagagggccccagaaccgtggtcctgcttgcttttcacagtgaggcacttgaaaccttcctctgctgagggctggtgatgtaatttccccgcttcccttaaatttaggaacccccacccttggatccaaaagcagagcagggttcccttcctgttataaagatgtccttgtctccctgcctctgatggctgctgtcatgtctgaagggtcagaaatccctccccacaagtccaactcagcaccctccgtggaggaggtcacagaacaccatagacacccctcaatgcaacagtccctcaggttcacggagaatgaggagcacaggtgctgcctgggctgacatcctgtagcgcagtctgttttgcattactagaaaggaatgagactgggtaatttatgaagaaaagaggttcatttggctcacaattccgcagactatacaagcatggcttcagcatctgttggcttttggttaggcctcaggaagcttttagtcatggcagaagggaaggggagccagcatgtcacatagtgagagagggagcaggagagacaggaagaggagccagcctcctttccacaatcagctcctctgtgaactgacatagggtgaacgcacccattactgcaggaaggtgccaagccattcatgagggatctggccccatgacccaacctcccgtcaggcctcacctccaacactggggatcacatttcaacataagatttggaggaggcaaacatccaaaccgtctcaaggctgcagattggtggctgagcaagggccgtggcatccagggtcagcgcacctgcacagctgggagctctgtcctgtcccttgttccatgaacagagacagtactcagccgtggggttctctgttgcaggccaaggccccaaacgccgtggtgctggtggtcgggacgcacctggatttaattgaagccaagttccgtgtggaaaggattgcaacgctgcgtgcctatgtgctggcactctgccgctccccctccggctccagggccacaggcttcccagacatcaccttcaaacacttacagtgagtgcccagcctcgggcagctcctgccttcttgtgggtgccagtcgctgatctttcctgggatcagcttgcagagagctcctgagtctgggtggggctaggcccctttcctggccaagggtggccatccacagagctgacccagccttggggagggtgaagacctaccagacggctggctggttgaggcctggaggtgcccctctttgcttcctttctgccccatccccgccccaagggccagtgctgaaaatgcatggtgcctattgaaccaggagactgaacgtgggcaccacccaaccaattgctgcccatctcatttgttgatcactgatcaaggacagaccctggggagggagggccagtccttccattgggtctgagtggtcctgatagcagcctttgagtcacagagggccaagagtttggaggggctttcagttaggcatcacgacgtgtccatacagataagtccaattgccctgggctgactgcctgtcactggactttcacaacagccctgcaggttgtggggattgtttgccactttgtaggtgaagaagatgaggttcagcaaattaagtgtgccctaatgggagtaaaatacactgcatattgcattatctgcactgatggctctcagattccctcgcccggggcagagcgccacgggtattggtgcatgggtcagcctgggacacattggcctggctcggaatacaggatgaggctgtcaggaattcctgctttgcccttgagaaagtcccatggggtctgtgataagaggagtcctggctctgggtcagaacccaagtccagcctgtgtgagcctgtgcctgcccagcctgtacccttgggggtctcggtgtacctctgcacctcactttcctcctccgtgaagtgccatgtttagtctgggaagacagactaaagcgacacagtgtggggcacccagcacagtgatttgcacaaagcaaggcctcaataaacttcttgtgttgtctttcacgagttctccagacttgccagcgttcaggacaaacctctcagggaaacagagaagcagcagcgcttcctcggagtggggcatgatgagtaaagacgggtctttttgctcacagtgagatttcctgcaagagcctggaaggtcaggaagggctgcgacagctgattttccacgtcacgtgcagcatgaaggacgtgggcagcaccatcggctgccagcgactggcagggcggctggtgggtaccttgctggtccagtttaaaccagtctgcctgcttcccattgttgggggtcctcacttccccctctctcctgtgaagcccatgtctgtgtggcaaggctcggtggttcctggtgagggagggtcaggatggaagatagtgggtggaaacgtcccaccccctcaggccacaggggccgggcaggatctgcccaagctggcaggtgtgccttgggacctgagagaccctgcctcgcccaactgtcccccagatccccaggagctacctgagcctgcaggaggccgtgctggcagagcagcagcgccgcagccgggacgacgacgtgcagtacctgacggacaggcagctggagcagctggtggagcagacgcccgacaacgacatcaaggactacgaggacctgcagtcaggtgggtggggctggggtaggtggcagggtgcccgtgagaaatggaactgtctgtacttgctaacttcagcttggcctcagtaatgaatgagagaccgacacccagcctgcgtttctgccttccatccccctccccttccttcttccctctcacccttctttccttggagggagagaacacaaacagctactctacaccagcattgtgtttgccacgaggacagacatacaagctgatggactggcgcctgccctccggggctgatattcagtcagggagacagaggtcaaacagttacaatcgattctcattagccacaggacttaacgttctgtaaagtcaccgcgatcactgaaatagcaaatacggaaccagtgctcctaggagagacgcagcgttgggctcctgcgagcctctggtcaccacatactcaccagcccgtcagtacagaaccttgttttatgtgtgttgctgcgtaaagatgccatacttaatatatgttgttgatttgttggcattgaactcacggctgacagcactattgctcattcatgaacaaagcttatctaacacacaggtttcctccataaggcacatcgcagccttctcacgcttagggaactacacagcgtttcagcacttcactagggaccattttgaacagtgaaagcgtcaacaaaaagcacaaaaattcaaaaaacgtggcactgacatagaccactaagcaggcagctgttttcagcatgagagctgagagagttgtcctgttcagcctccgctggcaacgtgcacattggtcaatgcaaatttttcaccactcagcacatgtctgcaaataaccgcaggagtgctgatttggaggttgcagatcaatcttagcaagaaggtgaatttgcaaaggcaaaatccacaaataatgaggatcaagtgtagttacccaggcggccatcagcctaggactttggcaagagttaccaggggccaccagggcacctgtgatcaggctgccagcccacctgaagggtccagcatgtgggacatgttggtttcttctcaggaataatttgtgacctgggtcctcttggaaagagggccaccccagagtccctttcgctcctttgtctaactgctgcttcctcctctccttgcctggggcagccatcagcttcctcatagaaaccggcaccctgctccatttcccggacaccagccacggcctgaggaacctctacttcctcgaccctatttggctctccgaatgtctgcagaggatctttaatattaagggctctcggtcagtggccaagaatggggtgatcagagcagaagacctcaggatgctgctggtggggactggcttcacgcagcagacggaagagcagtacttccagttcctggccaagtttgagatcgccctgcccgtcgccaatgacaggtgaggacacaacttaacacgccaggctgtgcaggttgctccccgaaagagggagttggggtctggagccactggtggcctgaacaagatttccagggatcagtgctgccactgctgccccctacggacaggccagcacccgatgacctgcctgccgggcctgggtcagcaggacagtgagcacggctggccgctccctcctgtgccacgggcttctctgttcagggagttaaaagaaatccacttattgaaaaggtgtaggaaaacatggaaggatgtcattaaaaataatttgtgggaatttcactttacaggggcttgattgcttgattatttggtaaatgagagtgagtggccaggtgaggtggctcacacctttaatcccaactctttgggaggccgaggtggccagatcaattgaggtcaggagttcaagtccagcttgaccaacatggtgaaaccccgtttctactaaaaatacaaaaattagccgggcatggtggtgcatgcctgtaatcccagctacttgggagactgaagcaggagaattgcttgaacccaggaggcagaggttgcagtgaacagagatcacagctctgcactccagccttggcaacagagcgagactccttctcaaaacaacaacaacaaaaaaagaatgagcgactaggatgtgcatactaattacacagcccagttccaaatgcagtccaacatgattaaatcatgagagcaacatcatcagctactccagggtggatggtccgagggtcaaatagaggcattccatatagtagctgatcattgcctctttctgtggacttctcctggatctgtaacatacccaggtctccccagtcctaaactgcaaacaaaacaaatgagcctctcctccttttcctccttttcttgctccccagcacctgccgctcctcatgactttgtgctggtcgccaggtagccctctaggtgcccccaggtacctctcctgtcctctgctgaccctgccccaagtactgaccctcccctctggagggccttctccatgagaggaccttgccaccctcccttccagcccgcagtgtcctcagcaggcccctcccctgcactttgcccaagccatcaattcagctgccttggtcctccatgcagctttggggtcctccttggtccgccaaaggaagaatcctcagattttcagcagggcccagcctccagaggctcaggcctgagcttccaaattgctcccacctggaagtctggcacggtgactgacacagcatgtctgagacacctgccttctctcctctgctgtgtggtcccaccgatcaccttcccccacgccccacccacggaactgtgctcagggagtggcactctaggctccaaattcctccctgtacccctgacacccactcctcaccccacctggaatgacatggccctgccatctcccagtgaaacaattctgttgacagcccctttcctccttgtgacacccatacctgcttctgtttttgtttgtttatttacaaagattttttccatcagttatcggggtacagttggtatttggttacgtaagttctttagtggtgatttatgagatttctggcgcaccatcacccgaacagtatacactgcaccctatttgtgtcttttatccctcgcccacctcccactctcccccaagtccccaaagtccattgtgtcattcttacgcctttgcatcctgacagcttagctctcacatatcagtgagaacatacgatgttgggtttcccattcctgagttacttcacttagaataatagtctcccgtctcctccaggtcactgcaaatgctgttaattcatccctttttatggctgagtagtgttccatcataggtaaagtttacttacagtgaaatgcccggatcgctagtgttcaaaacaatgacttttgacaaatgcatacaactgtgcaagcagcacctgcctcaagacacagaatgttcctgtcatactggaagttccgccagacgcccttccagtcgcttcccatccgtgtcagcaccagcactctgacttccagcaccagagcctactgtttcctgttcttgaacttctcaaccgcacagagtcacgcaatatggtctctaattggcttctcgcactaaacatcatgcctttgagatccatccatgcggttgtgtgtatcaggagtttgttctttctgttgctgagtagtattccattgtatggctttactgcaatttgtttatccactcagctcttgataggcatttggatggtttccaactttgggctatgatgaataacactgctgtaaacagtcttaagtctttttggagacacatgttttcatttctcttggatcaaaaccaggagtggaattgctggataatagagtgtaagtttaattttataagaaatcaccaggctgtcccccaagagactgtatgctcctccaagagactgtacactccatttcctccccactattttttttttttttgagatggagtctcgctctgtcgcccagactggagtgcagtggcacgatcttggctcattacaagctctgcctcccgggttcttgccattctcctgcctcagcctccaaagtagctgggactacaggcgcccaccaccgcgcctggctaattttttgtatttttagtagagacagggtttcaccatgttatccaggatggtctcgatctcctgacctcgtgatccgcctgccttggcctcccaaagtgctgggattacaggggtgagccactgcgccggcctcctccccaatatttgttgtctgtaggtctttctgattttagctattccagtggatgtgagcttgtacttgactgtggctttactttacattttcttcatgactaatgaggtctagcacctttcgtgagcttattggccgttggtatatcttcttctgtgaagtgtctattcaagttttatgcctattttatgattagaatgttttcctttttggtactgatatgtacttctttatatcttctggatacaagttcttttttttttattctttaagttctagggtacatgtgcacaacgtgcaggtttgttacatatgtacacatgtgccatattgtgctgcacccattaactcgtcatttaacatgaggtgtatctcctaatgctatccctcccccctccccctacccgatacaagttctttctcagatatatgatttgcaaatattttctcccagtctgtgacttcctttttttatattaatgaagtctaacttttaaattgtgtgattattgctttttatgtcatctttaagaaatatttgcttataccacaatcttgacaatctttctttatttttcttctagaaggtttgtagtttagcttttacttccaggtctataatctatgtcaaattaatttttgtatatggggtgaagtaggggtcgaggtccatttttttcctgtatattatcccattgttccagaaccatttgttggaaagactttcctttccccatggaattatcttggtttctttatcaaaaatcagtgatgtgggtttatttcaggactctattttgttccactaatatatatgcctatccttatgccagtgccaaaccccactgattattgtagctttagagtaagacttgaaatcaggttgcgtgagcgttttgtattagtttcctgtgattgctgtaagataccatgaatgtggcatcttaaaacaacacacatttttctggaggccagaagtccaaagtaagtttccctggtccaaagtcaaggggtcagcaggatcatgctgcctctgaaggctctagaagaaaatccattttcttatcttttccagtctctagagctgcatttcttagctcacatttcttttatcaatacataatattttacgtatttatggggtacaggtgagtagtttttacatgtgtagaatgtggaatgatcaagtcagggtatttggggtatccatcactttgagtatttatcctttctatgtgttggtatcatttcaagtcctggcttctaaccactttgaaatataccatatattcttgctaactatcgtcaccctagtctgctattaaccattagaacttatttcttctaactgtatgtctgtacccattcaccaacctctcttcctcccactctcacacccttcctagcttctagtatctgtcatgctattttctatcttcataagatcaagttttttagctcccacatatgagtgggagcatgcagtatttgtttctctttgcctggtttatttcatttaatgtaatgacttacagtttcatccatgttgctgcaaatgacatgatttcattctcttttacagccaagtagtattccattgtgtatatggacctttctttatccatttctccattgatggacacttaggttggttccttatctttgctattttgaatagtgctgcaatagataagggaatccaggtatccctttaatacctgggttcttttcctttgtataaatacccactagtgggattgctggattgtatggtagttctatttttagttgtttgagaaatcgccatactattttccacagaggctgtactaatttacattacagccaacagcgtataagagtttttcttttctctgcgtcctcaccagcatctgttattttttggttttctgatagtagctgttcaactggggttatatgatatctcattgtggttttgatttgcatttccctgatgattcatggtgttgagcatttttcatatacctgttggccattcatatgtcttcttttgaaaaatgtctattcatgtcctttgccttcttttgagattatttgagttttattgagttgtttgaatttcttgtaaattgtggatattagttccttgttggatgaatactttgcaaatattttctctcattcaacaggtctcttcactctgctaattgtttcctatgcagtgaagaagccatttagtttaatatagtactatttgtctatttttgttttagttgtttgtgttttcgaggtcttagccataaaacctttgcctagaccaatgtcctgaagtgcttaccctgttttcttctagtagtttatagtttggggtcttaaatttaaggctttaatccattttgagttgatttttgtatgtggtaagagatagggggtctagttccattcttctccatatggatatccaattttcccagcaccatttattgaagagggtgtattttctccactgtaggttcttagcacctttgttgagaatcagttgactgtaaatatgtggatttatttctgggttctctattttgttccattagtctaggtgtctatttttatactgatatcatgctgttttggttactatagctttgtagtatattttgaagtcagatagtgtgattcctccagctttgttctttttgctcaggattgctttagctattcaatctcttgtttggttccatatgaattttagaatccattattgatctgttcaggtttactttttattcctgattaactttgggtaaggttttatatttctgggaatttgtctgtttttttttcctaggctttgcagtttgttaacatatagttcttcatagtagtctctgatgatcttttgtatttcggtggtatcagttgtaatgtctcctttttcattaccaattttggttatttgggtcttttctcttcttggttactctagctagtgatttatcaattttgtttatctttttgaagaatcaacttttcatttaattgatcctttgtattgttttttaagtctgtattccattttatttctgctctgacccttatttattatgtggtttctttccttctgctgattttgggtttggtttgtaaatgtctgtaaggtccttttggtctcaagtcatttaaatccaatgtttttttgatgagtttctgtctagatgatctgtctaatgctgagagtggtatgtttaagtgccatactattatagtattagaatatatctctctctctagatctagtaatatttgctttatgaatctgggtgctccaatgttgggtgcatatatattgatattgttatattctcttgttggattgatccctttatcatttcttctttgtctttttactgcttttgacttaaagtctgttttgtctgatacaagtatagcgatgtctgcttgcttttggctactatttgcatggaatatctttttgcaatgctttactttcagtctatgtgtgtctttacagataaagtgagtttcttattggtagcatataattgaatcatgtttttttaatccattcagccagtgtacaccttttaagtggagaatttaatacacttacattcaaggcaattattaatatgtgaggttttgttcctgtcctattgttaattattttctggttgtttttatatattctttgttcctttatttctctcttactgcttatcattgtggtttggtggttttctgtggtggtaccatttgagtcctttctcttcctcatttgagtgtttgctttaccagtgatttttatacttttgtgtgttttcatgatgttaaatgtcacttttctttttgcttccaggttaaggatcccttgagcagttcttatagggccagtctattagtgacataaggtttctgctgaggaatctgctgttagtctaatggggtctcttaggtgactagattcttttctattgctgtatttagaattctctctttgactttagacaacttgactataatgtgccatggagaagaccttcttgcattatctctgtttggggatctcagagcctcctgtatctggatgtctaaataccttgctagacgtaggaagttttcatctcttattttgttaaataggttttcctaaccctttcattctctcttcaccttctgggactccagtaatttaaatacttggttgctttatggtgtcccatatatcactcatcgagaaaatatttactcattattttcttcatttttctttatttttgtctaactctgtttttttcataagacttgtcttcaagttctgagattatgattctgcttgatctagcctattgttgaagcttttgaatgtattttatatttcactcaatgaattcttcagtcccagaatttccatttggttttttttaaatgatattaatatctatctctttggtaaatttatcatttgtatcctgaattgtttttctgatttctttgtattttttttagaattttcttctatctcactgagctcctttagtatcagaatttttaattatttttccaggattttataaatttgttcttgattaggctgtatggctggagaattattgttttcctttggaagtatcatatgtccttgctttttcatgtttcctgtgtccttacattgatatctgtgcatctggtgtaacagtcacttcttccagtatttgaatttgccttcacaggggagaactttctcctgaagaggcatctgtggtgttggttcagtagggcactttggctttcattctatgtagatgcagtagtgtaatctgtattatttctttggctataaacaatgtcagtggcatctgtgatttcctcagtaatttagggtgcagttgttagtggagcttgtggggaagttttgctgggaacagggatgccaggtgggccagtctttgggccccagtggtggcagcaggcatgcctctccttggaccccagggtggtatacactggcaccagtgttagagggtccagacaggcctattcttgggcttccaggaggcttacttggatgttggtagtggcatcagtgggccaggtaggtggctgggttctcaggtccctaggcagctggcatggtgtgggtaatggcagtggaagtggcaggaaaaccttgtaggtcctgagcagtgcatgctggtattggcagtggctgcaatgggctggttgggcttgtgcacagggccacgggtgacatgtgcaagtaggtaccagctgtagtggtaacagcagagtcggtaggcccaaccttaggccctcaggagaagtggtcaggtaccactgatggtggactgaaccactgagctgggcagtccctcagccctagtccacatgctctggcacaggggccaggggacatgaagccaggtcaggtgggcttgtattcaggcccctcaatggtgtgtacaggtaccagccatggtaggcaggagtgaagtgatccccaggccagcaatggaatgctcaggctggggacatcagtggccacactgctgccctgccactggggagggtgggccaccttcagtggcaacagattaggctggtgggtggggaacatatgccactcacaccttagcctttaaggtggtagcctatgcctcactcacacctcagccccaggggtagcagcccacatttctcttgcacctcagccccagcaccactgggctcccggacagtacacagtctgttggggacagggctgtaaaatggctccttgcagatttcttaaagaactaaaagtaggttaccatttgatccagcaatctcactactggctatctacccagaggaaaagaagtcattatacaaaaaagatacttgcacacacatgtttataacagcacaattcctaattgcaaaaatatggaaccatcccaaatgtgcatcaatcaataattggattaaaaaaattgtggtatatatacaccatagaatactactcagccatataaaggaataaaataatggcatctgcagcaacctggatgaattggagaccattattgtaagtgaagtaactcaggaatggaaaactaaacatcatatgttccaaattataattgggagttaagctatgagaatgcaaaggcataagaataatacaatggattttggggactcaggggaaagggtgggaggggatgagagataaaaaactacacatcaggtactgtgtacactgctcaggtgatgggagtgccaaaatctcagaaatcaccactgaagaactttatcacgtaaccaaacaccacctgctccccaaagccctattgaaattaaaaattaaaatataaataaattgcctccttagtgtggctgctcaggtctcagagagtgtgagacctagagtgagcaccctccgagcagtgccattgcacaatctcccatcagttagtttcagggcccacaaagggtgaggggctctcctgtgccttggatttcaggagtccagagtgggaatgtcgaccactggggatctctcacttacctttccccacactggggagtctctctcagctctcagcctagcaggctgccttgcttccttgtccttccttgccttaggtatttcctgtcacttttctgttgaattccagtgttccctcttggatgatctattcaacgtgtgattatctactcactattttgcctcttctcagtgtcagaggcaagtctgaaatgcctctagtcagccatcttgaagccgtccctcccagcagcatggcaccctgcgccagtggccatcttgccttcttctgtgcaaatctctctcttcccccatcttttaagcacacttgtggctgcacttaaggtccacccagataatgtgggatctttcccccatttcaaagtccataacttaatcacatctacaaagtctctatttccatgtaaggtaacaatcacagttctagggtttaggacctggatattttggggctcattattcagcatatgacaccctccaattttgttcttctgtttcaagattattttggattattctagatcctttgcattttcatctaaattttagaatcagcttgtctgattcttaaaaaaccgttgtgatttttatggagattacattgaatctatagatcaaagaaagctgacatcttagaaatattgaatcttccaatatgaacatggtatatctctcatttattttggtttttaaaaagtttctctccacggtggtttgttttcagtattcagattttctgcatcttttgttaaatttgtgtctacataatttatgttctccgatatgggtaaatgacatatcttctaatttgatttccatttcttgttgctggtatacagaaatataatttatttttaaatatttaccttatatcaaaaaaccttgctaaattcacctattagctccagtagatttttcaggattttctaagtatgcttcttttttgaaaaaaagacagttttacttttttcattctaatcttcacatatttttttgctctgtttgcctgattgcattggctcggatctctagcgaaggtttaaatagaagggatgagagaaggcgtcattctgtgtgatctcaggggggaagcattcagtctttcaccatcaagtgtgatgttttctgcagagctttgttatccatggaaactttatcagattgaggaagttcccttttattcccagtttgctaaaagcttttatcataaatgggtactgaattttgtcccccaaaaatgcttgttctgcctctgttaatttttttcttcagttatttttctgttaaatatgttgatggattttcaaatgttaaaccaactttgtattcccaagattcataccaagtgttcatgatttattatcttttttatctaatgctagatttcagtggctcctattttgcataagaattttttaatctatgttcatgagggatattggttggtactttgatgaaaagtctttatgggttatcagacataggctgtcttcataaaatgaattgaaaagatttttttccttctctattttcttcaagattttgtataagattggtgttagaccttccttaacagtttgatagaatttatagcctggagtttacttcacaagaggatttttaattacaaattcaatctatttattagctatagggttattaaaattttctattcttgtgtcagttttggtaagttatttttttttcaataaattttttcatttcatctatggtgcagaatatattaatataaagatatttaaaatatctctggaatgtgtagtgatatgctctctctcctgatattaataatatgtcttttctctcattctttcttgatcagtcttgctaagtgtttatcaaatttttggaaccgttttaaagaacgaaccgttgccattgctgatttcttctattatttttctcttttatttcatctattactgctctttattattgtcttccttcagctaactttgggtttaatttgtgcttcttgttcttccttcttaaggtagaagcttaggtcatttattttaagcctttcctattttctatgtaagcatttaaagccataactttctaagcactgctttatatgacaaatacaactaattttgctatgttgtgtttttatcatttagttcgaaagattttctaatatatcttatattattttggtcagagaatatattctaagatttctgtattttgaaattcactgagacttattttatgggccaatgtgtgatctttcccagtgaaagtctggagtgcacacaagaaacgagttttctgtgttgtggctgtagtatcttataaaccttaattagctcagagtggtaaacaacgtgttcaaatcttccgtattctcactgatttttttcctactcattctatcaattactaagagagagatggtaaaatatctaatgataagtctacctctctctccagttctgacaggctttattttatatattttgaagccattattggttacatatacacattggtgtcatgcctgtgtaatgaagtgacccttttttcattatacaatgtttctctttatcactggtaatactccttttcttgaagtctattttgtctgatgttaaaatagccacaccagctcttttagttctacctgggttttttccctattcttctagtagcaggttatgatctctataaaaaaggaatctcttgctgacagcacattatccaatctgataatctctgccttttaataggaatatttgattcattcacatttatcataattaattatatggttgggtttaagcctactatttctctatttattttgtatttataccatctgattttgttattttgttcattctttcctgccttcttttgagttaaattttattttagtattttcatgctctctgttgggtttttggccattcttcctggtactgtgttttagtggttactcttgggattagaatatgcatccttaccttatcacaatctacttgtaattaatattataccaccttgaattaaatgcaaaaaccttagcacgataccaggacattactcctcccagcaccctctgtactcttgctgtcatccacgtttcttctatacagtagtcccccttatccacagctggtggatttccagacccccgtggatgcctaaaactgcgatagtattgagccctacatatactatgccttttcctttatctacatacctatgatgaagtttaattgtaaaccagtaagtgattaacaacacatagaaattaacaacaataacaacaaaacagtataattatgatatactgtcacagaagttacataaatgtggtctctctctctctctttctaaatatcttgatatttttggaccagtaattgaaaccatgaaaaagaaactgcagataagggaggactacaatatatgtaatgaaccccataatatagtgttattacttttgctttgaataattaaacaatcaatagtcttttaagaaattaagggaaaaatgttgattgtttctggtgctcttcacttctttccatctggtataatctcttttcatcctgaagaattacgtgtagcatgtcttaaagtctaagtctgatggaaacaaattctcttttttagacaagacttttgtttatatgaaaatgtctttattaacactctaattttttgctggataattttcttcgatgtagaattctgggtcatttttctgtcagtctttttaaaggtgtcaccccattgtcttctgggcagacaggggtcctcctcagtcttcgtcacccctgacccctcgctgaggacctctgaccccatgccacctcctctcatgtgatcaaggatgcccagccacctgctctgctgcagcccaggggcctctgagaagcctactgcccctccgagagctctgccaccatcctcctgtggcttttactgcccttacactcccctacttgttacctcttacccacctgcccggaccctcagttatgctgtcagcccttgagcattgggcagcacacttctctgcctccccacagcatgtgctctggccctggcatttggcccatggaaggcaggggagagggagtgaggccccctatccttacaagcagggtgctcttgtcgggggatttgtgcagactctttatgagctattacttaacttttcttccttcaaattctcacttttgaggcttggttttcatcaaaaccaagtgtagtgttggcttcttctttcctcctactctcctctgtgctacccattgccaggatatatcttctgaagtagctgaactgaacgcctcccctcggggtgggacccctacgagggccaggctgggggagcacacgaggggtgagacctgccatgatgctctgccctaaaccagcttggtcctcaggcctctgagtactagtttccatatcagccgcttcctgggtttgatgctgatattggcaatgaagctgtatccaggatccaaatccacaggatccaaatccacagaatgttgccatgcagcacccagagaacacgtcgccactctgcgtcctcagctccagatctctacaggggtgtcacctggagacttctggggagcaggcctggatcctgcacagtgaggccagagacccggccacctgggaaccagccactggccccacctttgcctgaggccccacccacctcccactaggtatgggaggggcctcaagtctttcttgctgctccagctctctgggttccttacaaaataaaaccccaaagaggaattcaaaattccacagcccctcataacatggcccagcggtgtccttaactttggtccatgagaacgttcagagtaaggcagcctgtgtgtttacaacattgccggatctgacaactttcagattgttttatcgcaggttagaggagtgaggagatacgagtactcagtaaaagaaagtcagttatctatatgaagtcagtttttatatgtataaaacgtacacgtatttataatgtgtgtgtgtgtgtgtgttggcctgaacaagaccatcagtgtgatcacggccaggtcctcaccaaggcttatggcacagcaggttagaatatgaagttgggacgcacaagtatgaatcccaactaccttctttctcgtctgcataatgggtataatataattaccataagtatgatagttgttgtgaggattaaattagataatacatgtaaaatattcagaccagcagaaagaaacagtagcaggcatgtcccagggcctcctgcatgggaacagccactgacaaatacatgtaaaatactcagaacagtgtctcttaagctcccaagacatccagtattgacagtccagttattgttactgtttcttcgtggtaggtactcatagccatggtgtcgggttctgtacacatccaggaatagtgggacacgtttcatctcagcacaggcataatggttcccttgagccccaggcaagtccccgctcctggcatcatcagctttctaaggctgctgggatccctggatctgtgcaaacagacacatttgcggctcctctcagagcatggtttcccacctgcagtgaacccctccagcccctcagaaaatctccatgaactccctggaagtaccatacagttttaagcctttgtgcttctttcaggaggaaggtccttgcctctcagcagactctgagaagggctgcggcccctgtctgaggctgtctcagtggggtggcatgagccagcacctccgtgcagacactgtgccctgccagggtttcactgctttacgttcatcaaacacatgaagaatttacctcttaggacctgtcctgccgactcactggtcattccctgggacggcctttcccagctcgtaattgctctgaaacccggagccagcggcctccactacctggagaccactgcttcccttgagaactggcttctgtggccactcaggatctctttatttgccatgtcaccttctaaacctctgccctcaaaaacatcatggagcacctcttctgtgtgccaccgcacatcgtgctgggacgcctggggacagagaatgctccccccactctctaagcacactccgacaaggagaagagcaagacagacatggggcaccaccactgtaagagggccacatgagagacccaggatgcatgagatgaagtagaaaaagcagaaagaaacagcaggcacggcccagggcctcctgtatggggaacaaacactgagcagatagagaagcaaggacttttcagatgtaaaggaataagacaggacactctgatgaagaggcatctagcgagaggttgggaatgtcctttcactcaagacctgaaaggctgaaaaggcctcctgcttcaccacctgtgtctgctgtgtcatctgcacagcccccgtctaccttcaccagccctgccaagaggggatcctttctctccccattgtatacccatgtgtcagagcgtgtaagtgagagccgagacttgcgcctgtatgctcgggccatgggctgtcactgaattttcttacagtttagggagtcttttccagaaagttctaaggacatttattggactgaaatagatttaagattaggagagctgaaggtaaaacctttattgggaaggagtgcagcatctgcacaccaggggccgtcctgtacctgtccagtgcctgcccccgcagccccacaggatgcagccgttgctggttttcgggcacccttttggagggacctcccaggtttcagccgtgaagcccttgccgatgcaatgatgcagcatttttatgatgaccgagagtgttctcgtaaaacatccctcttccgcacaaaacaggcctattctaacttttaaggcaatcgcgtcgtgtcaacgggccaagaataataaatagctttaaaggccaaaaatgttactctgaccctaatatctgcattgtccttgaaaccttgcagctgtgtttgtttttccttcatcaaccaaagttaatgttatttccccaactgcaaccccgtttatagagaattgagtcccatttgctgtgtctgacatttttaggaccatgatgttttcatgtcttcccttagccttattctagtatcttagaaaccatgatagactcatattaatgggaccagtcttcattttcctttggagtatttattcttagcatataaaccacgcttctcttactaataacagaattccaaaggccctgggaggaaggaacccagcagcctgaggtgttccagcacagcctgtccccagatcaggccatctgctggggtcagggccctgcagtggagcttgggccccactgttcaccagtcccccttggtgtgtttcagctacctcctgccccatctccttccatctaaacctggcctggacacccacggtatgcggcaccccacagccaacaccattcagagggtatttaagatgagcttcgttcccgttggcttctggcaaaggtttatagcacggatgctgatcagcctggcggagatggacctgcaggtattatggctgcggtttctgcatagacagatgcccgagagccacctacagttgtaccactgggggaggggaatgccctttgctggggggccctgcctggagacccttctcctagagccatgccaccaatgtagtgccagggggcaggtgtggcatgggctgctggccaacccactgaagccatcctgggagttccaaagcagcaccctccttagacagaacacgccctttataaacagtggttctcagtgttagcccacctcaaaaccacctggagtttgttagaacacagtttggtggccccacccgaggttctgattcagtaggtgtggactgaggccaagaattcacatttctatccattccccgaggtgatgccgccggcccagcaaccacacttggagaaccgtgaagttagaagcacggttttgccgtcctggctgcacgctagactcgcctggaggaaattctaaaagacacagaccacactccagaccgattgaatcagggtctttgagtgtggcatcatttgaaaaagtgattcctctttggtatttttaaggctcccaggcgagtcccctgtgcagtccagtttgagaaccacttgtgcagaactgtacgttggttctggtaacacgggagaccccccgcccaaggagttagcttctgtgggtttacctggggttacaggaaggcgtccccgctgtcagacaacattaatttcatgcagggcaggaacatggaagcaacatttgctacagtggtgtttttcaaagtggggttcctataccagcaaaatcagcctcacctgggaacgtgtgaggaacacacgttctcaggccccacctcaaacccactgcatgagaaactccagggggaaccccgcactggttttcacaaccctccaggggattctgacacacttttggttttgcgaacctctggcataatccctgactgtcaaatccttgacattaaactccgtatgagtttactgttgctacatcctaattagaaagcccttattgaattataacttcttagctctataaaaatgttctttgatcttcccatttttaccgaaatggtaagaaaaaaatcaatgcaaaagccttaaagtccatcgtgacagtagcagcctgtgctagcggggagggagatgggttaatagcgccagaagggtgcactgattgaaggagtgggcgcaggcgctggtgctcctacgttcccattcctctgccctccctttgaactctgtgtgccgctgtcttctcaagggagggtcatggagcactagcatcgtgggaggctgagctgacaagtggggcccagctgggcctggaggccagggcgcccttccgggcagcagcttccctcactcgaagttaggaaagaagtcctattgaaattcagatgggtgacaggagggggaaaagagtgcagtctcatcactcatcaaaggcatgcaaattcaagcagcagtgagatgccagttttcatccatcacattagcaaaaagctgagccgtaatccccagcccggggcacggagcggccccgcgcacactggtagtcagcgcacaggacagtctcgtcgttcgagaagcgattcctcgggatacatccagagctttaaaacgatcagacccttcgaccaataatccgactggtaaacatctaaactgaggacatcattttcaatcagagaaagctctgtgcctttctcatgtaactcaaggtggttttgagggagcaaaagattggcaccaacttacacttccagaagagagtggttcaggaaattactatgcttaatagaatattaaactttagaaaaatgaattttatgtgtgtttttaatggcataggaaaggtggggttttttaacatatacgaaattagaaatccaatatggcttcagctgtttttcacaaacatatggagatagaaaaaaaaaaaatcctggaataatatataccaaaatctgaatgatctctctgcttggtgttaaattggtgttttgttttccctcttacatttttctgtattttctacattttctaatatgaatttttgcttgtaaagtcagaaagggaaaaaaattttaaaggaaagcctatttttcaattctttggaaaaactgtgtttccggaattccctggagaccccgtcagctaatgtaacgttcaatttggcagcagggatgagcagcgtgggaggagagggtgggaaagatgggggacatttatcaagatggggcccagcccggcctctgcagagctctgcccagggccagcgaggagcccagaatacttaagcagggtcttttctctgtctttcagctttttgaaaacaagaagaatactaaaagcaggaacaggaaagtcaccatttacagttttacaggaaaccagagaaatcgctgtagcacattcagagtgaaaagaaatcagaccatctattggcaggaagggctcctggtcacttttgatgggggctacctcaggtaggaacacctggaagcccacctgccaggtcagcaggtgccacagcagccaccgcggggccacgtcagcaggatgcctcatcctcttggtgtccagaattttgctcgtgagagcggctcgtcatggcagcttgctagaaatgtgaggccctcccacgagtgtcccagaggctccggtctcctcacccctgctgagccccccttgcaggacgggaaaggcaaaggcagatgtggcggccacagctgaggacttgagggacgtggcggccattgagctcaggagagcctcaggcacttcccatggttattcaggtcaccatggtgaccttgcagccatcctgcccgtccccttgttctgtgagaagccaggctggggacaggggatgctgagactcctcagcccccatctccactgcccataaccagacacggaactcagctccctgtgccatttattcttggttttttgagagcggtagacctaaagtcagcccaacaggtttaacgaatgataaacacccaagattattttaatgtttacaatgaactttgcaaaatattcttcagctctgtgagaggagaagaagggaaaaggggaggtaactttacagagggcttgattggcacctgcctcttccgcatagatgttctcacttaaggcccagggttgctgctggacagatgagcatactgaggttcagggaggtctgggaacttccttagggcctcacctgagggtcagctcccaggctgagcgtccctgactgcaatcttcctcgtgcctccttcaccaggccaggtccggggcaagaacaaggcagggccacgcacacgtacatacagggaggagtcccccatcggtcctgcagggcacagagtctctccaggtccccgggggttggttcctgtccctgggggtagggatatcatcccagggtcccccagagccagatcgcaatgggctccttttggtctctggattgcagtgtggaatcttccgacgtgaactggaaaaagaagaaaagcggaggaatgaaaattgtttgccaatcagaagtgagggacttctcagccatggctttcatcacggaccacgtcaattccttgattgatcagtggtttcccggtaagaggagatgctagaagcaagccctcattcatgctaatatttcttatgaatcagggtggggctgctgctttcggggtggacaaaaatcccactgggattcagcccaagaaaactagggggtcttaacagcactttggtgggagtcctggcccccgagaagtccagctctgtcactggggggagtcccacggggaggactgggctcggacaccactgggaatgtgcagggaagcggcctgccagctgcccacaggcgtggcaagaaagatgacactggtaccacgagtggtccacggagatgctcagtgtgagctcacacgtgtcttgttttcatagtgaggactgtgtggctgaaattgcaggggagccggcagatggaaatttatcccctgcgcaggggcagggatggaggggagccgtggcagccaaggggccttgctctcctcccctgccaccccacccatcccggcggtgatcaaaccactaacaccgcccttctcagaccctttggatctgtttcttcattgatagttcacccaaaaaaagtactctttgagtgaagttcctgaggcctcctgtttgttttgctcctggggtggagacgactcccagagcagcctgccagggggaggccatctggggtttaatggggcaagcagctgtgggaggggctgccctgagagcttcagccctgaacgctggaggccaagcagctgtgggacaggctgcccgagagcctcagcccctgaacgctggaggccaagcagctgtgggagagcgggtttggaattccagtgccacccctgcaagcctcggctggtcccccggcctcctgggccggcctcacctgcatgcaatgcctgcatcccagacagcatcagggaaggtggctaagaggcagtggcagaatgcactcaggatacacattccagatcccagggtctggtctctgtcagggttggggtccttcacactgttggcaggaagggtgacctacaaggaaaaaaggcttagaaaggagccctcggagaagtcagctgggtgtgcgtgtcatggtgatttgggaggcacttggctgtctaagggggcccttaggcccatgtgaacccttctgggcactttgcagctccccaccagccagtgttccccacacagcaggtgctgggcagtttgacaggtgggtcccttagacagtcacctgagatggaaagggctctggtgagcacctgagacagatcgcctggagccagcatccccagccaggggcccctcccaacgggatgccttacacatggacctgcagatatcagatgtgcctggaaagttctaggcatccacctcctaccttgcatgaagcaggcagttggccggccctgagggcacctccacagggcatcttggagggtgtttctctgcacctcctctcagaggcgtgggggaatcccgtgtccggtgactgagtttcgtctatgataatttgcactcatttctgcccctgcattgcccttcatggacattgtaaacctgatgtttctaattgtaagaagggtgccttccccactgccgtgatggttggaggatagctcacacctagtctgcgatgacctgttagggcccagtcatgcaggagggatccccccactcctctcaggccccccagccagcctgctcagtgtcccgaccactggacagttctcggaagcatcctgaaccctccctggacacatctttcaggacaaacaattgcgctctccaaaaaggcacccgaatgtggcagtgggtttcagcctgtctcttgggtacaggccaggacaggcagctcccctgctgcgaaggcctcagggcctggggtgcagagtgctgctcggggggccctcctgcaccaccttcttgtgaagctgtctcctgctctgtccttatttagccctgacagccacagagagcgacgggacgccactcatggagcagtacgtgccctgcccggtctgcgagacagcctgggcccagcacacggaccccagtgagaaatcagaggatgtgcagtacttcgacatggaagactgtgtcctgacggccatcgagcgggacttcatctcctgccccagacacccggacctccccgtgccgctgcaggagctggtccctgaactgttcatgaccgacttcccggccaggtatgccccgaaggcccctcccagaacacagtgcaggtcacagggggcgttcctcgctgtgcagttgccgagtgatctccaggaagacccctctggggcgggcaggtgccccggccatggcttcccaccaatctcagtaccttttaggttcccatcctcggctgcctgaaaggaaccaggctgccggctttccattttggaggccttgataggcccaactgggaagagtgctttgcaagtgcagccatcctgcctccccatacggctcccccttcccctcgtagccagagctgctctctcctgagctgcctctcctttccactcctacctccccaccagctctagggccagcagataagtgcagccagtgctcctcaagcattcaggaaggggagagaagggagagctcccacccagagccttgtttaccttctttgtcaaacgctgactcctgtctgtagccctagcgctgagctcccacccagagcctcgtttaccttctttgtcaaacgctgactcctgtctgtagccctagcgctgagccttggacccctcaaatctgttcttagagtttattgtacctatgctaacccaagatcataactagagagagaatcggggaggaaataggaaacgtcacctttcagaagaaaacttccaaaggggtcctttctctacggccaccacttctgtggggttcaccctgtgccagccatcaccacctctgaggccgttcctgtcctgagagccctctgtacagaggagactgaggcttagcaagcctgcataacctacccaggtgtgctcacccacaagtggcagggccggggtggcccagatctgtccagcctcacagatggctttgaaccatgactctcggccgttggggcaaatgacccagcccaggacccacccgcatcagggcgggggggatgtggctgatgccgggcgtgtgtggcaggctcttcctggagaacagcaagctggagcacagcgaggacgagggcagcgtcctgggccagggcggcagtggcaccgtcatctaccgggcccggtaccagggccagcctgtggccgtcaagcgcttccacatcaaaaaattcaagaactttgctaacgtaccggcaggtaagcgggtcccaggttggtgctgtttttctcagacatatgctgcccgggtctaagctctgtgcggccttagagaggcctgaggctgcaggcaccccatgtcctactggctgacactgcgctgtccctggcagacaccatgctgaggcacctgcgggccaccgatgccatgaagaacttctccgagttccggcaggaggccagcatgctgcacgcgctgcagcacccctgcatcgtggcgctcatcggcatcagcatccacccgctctgcttcgccctggagctcgcgccgctcagcagcctcaacaccgtgctgtccgagaacgccagaggtaccgcggcgcgccgccccacccggccccggagaccgacagagccccgggcgcctcctgcctggcacggggggtagagcctcaggtggccttggcaagcccagggcacgcccaacccatggctcgtgtgaccatcccctggctgcgaggccaggctccccgccaggtccagtcactaggcagagccttggcgaggacgggggagcgcacactctggagtcggctaagaccaggctctgccgcggtccggaaagccgctgagtttatttgcctgtaaaaggaggatggtaacaggcctcgctgggagggcaccgagcacgggagctgcattgaatcactttcccaactgcacacgtacacggctgctgagactctgagaccgcagggtcagtgggaccatattttaacataaaatgtcgaagtaatttaccttgagaaaagagcagctaaactccagagtggccagagggtgaaaggtagctgtcttttgactaaggaagaagaaatgctatgaaaatcaatcacttctgcctcaatggaagataattttttaaacagaattctttacttttttttaatacaggatctcactttgttggccaggctggaggacagtggtgcaatctcagctcactgcagctttgacctcctgaactcaagccatcctcccaccgcaacttcccgagtagctacaagcacacgccaccacacccagctaatttgttgttgttgtttgtagagatggcctttcaccctgttgcccaggtcgttctcgaactgtgagctcagtcgatccccccactttagcctcccaaagtgctggaatcaccggcatgagccacacgcccagccaaacaaaatgcttctacttgcctctcacccctttacgtaggacagccttgacctgaggtgaactctagagatttcgaacccttgctcattcagcaaaatgccagcaattccaggaataagatatcaggaatgaagctacagcgatgagcatttctatcctaaatactgtttcacttaaccaggccattctctgtcctttatggcagtctggtgaatagtgagaatgtgtcaatggaatataaagtatctaagggccaggcgcagtggctcacatgtgtaatcccaacactttgggaggcccaggcgggcaggtcgcttaaagccaggaattcaagaccagcctggccaacatggtgaaaccccatgtctactaaaaatacgaaaattagccaggcatggtggcacgcgcctatagtcctagctactcaacttgggaggctgaggcaggagaactgcttgaaccctggaggcagaggttgcagtgagccaagaccatgccactgcactccagcctgggtgatagagggagactctgtctcaataaaagaaaaaagaaaaaaaatcataaagtatctagggagatcggaagacaaaaagacagttgttatcatgataatttgattctatcaaaactgaaattttgatacatttgaaaattgtttttctttgcaagattcttcctttatacccctgggacacatgctcacccaaaaaatagcctaccagatcgcctcgggcctggcctacctgcacaagaaaaacatcatcttctgtgacctgaagtcggacaacattctggtgtggtcccttgacgtcaaggagcacatcaacatcaagctatctgactacgggatttcgaggcagtcattccatgagggcgccctaggcgtggagggcactcctggctaccaggccccagagatcaggcctcgcattgtatatgatgagaaggtacgtgcctggatcccctggcccagccccacagtgtaggagcccagccctcaggctagccgggcagtcctggaggcacctgaagcttcggggctcagcatccccaaaagcacatttttctcactctcccttgctcaatgagggaggttctggcttgaaccagaagggtgcaggggcctgtgtctgtctgcttgtagcaaagttgacttctccttagcatcagccttctcagaccttgattcagtaacattgtagaggctgtaaacagcagatgaagagtccaagagagaaacaggtctggatttgggctccaactcacatttagatgtccacagtgaggacacaggaccagccttgcagggcactcaggaggagcagacagaataaggacggtaaagacccttggccttaagtcccggccacagggtgctggccaagttgaatgccaaaccaggagaagagtgaaagagcaagctggcatcccctggcaactgcactgccagcctcagttgagacaatgactaaatgttgatcttctgataacatttatccctgatggctacttggtagatgcaggcacacacacaacttgaagtcatcttaccacgcatgtattacatctagtgccagccttgttaattgatcacccagcattaaaattcccttgtctataatttcttattatctggtgattctacagatggtcattgactaattcctgtaggaatgacctgtgcatgtatggattagctcagcacctgtggttgttgcccatagaaaaggcaaatcagagcaacaaaaataagagcttcataatagtagctgacttcaacaaggaggtcaccttgaaactcagattatcatggaaacattcacattaaaaattctcaagtctatctatctcagtcattctcctgctaaaatgttatttcttgacccttataggggtctgtataaatttttccttgctggacctttttgattatgaaaattagaggagacaacatgttgtgatccaggagacgctcctttttttatgagttgcaatacataacacttttagtaccaagcacattaagctgagggtgtgtgttttcctgccttgtcttggtactcaagaataaggaccatgacatccttggagtccttaatcagtgactaacagcaagttctcagtgtgttttattggatggaaggatggatcgatggatagatggatggatgggacaatgggcaaatggacaatatggtgggaagtcagatggatgggtggatggaaaagaggaaggataggaagacagatggataaatgtgcaggacaggtggtcggatggatagatggatggacagatgagaagaatggataaatgtacaggaagacaagcaaatggatggatgggtggatggatggatggaaagaaggaagggtgagaaaatggatagataaatggatagaagagaaagtggtcagataggtggatggataaatggatagagggacatggtcaggtggtttgttgaatgtttgttttccttgtctaattgtgtctccctggtccctccacctgagggccaccttgtgaaggccactgggcccaggcagcgacctgacttggcttgttctgtgcccaggtagatatgttctcctatggaatggtgctctacgagttgctgtcaggacagcgccctgcactgggccaccaccagctccagattgccaagaagctgtccaagggcatccgcccggttctggggcagccggaggaagtgcagttccggcgactgcaggcgctcatgatggagtgctgggacactaagccagagaaggtacttggggacacagagcccagggcctgggacctcctgccatgtgaggaagctgtgggtccccagggggtgtgtgcctggctgcccaaccatcaccattggcaacccttctctgctcatttcttctagagggtgatgtttgctgctcctaacatacctactttcattgtctttgtgtgtgcgtgtcactcttacgaaacaaacttccttttcctccccgacttttgtgttacttcaccgtgcaaacaaagtatataaacccctttataacaatacagtccctatgcaagaacagagagaatgtgggtgtctctttgtaaagtgatggggaaaaggtttcgttgtgagaatcagggatcatattacagtgttcaggctagttttttgacggtggtgtttttgtgtttttggaagaggctagtggtttcaaagttaaaactcatttattaaatcagacagagctagtttaatgtatggggagtaaacagggtattctttagaagaacgcatgtccttatctgggcatggtgacatggacttatagtcccagccactggggaggctgaggcaggaggatcacttgagcccaggagttttaggctatggtgcgccctgatcgcacctgtgagtaggttctgcactccagcttgggcaatatagtgagatgaagagtgtatgtccttgggcctgggttggaatacccagggttcagctaacctgaccagatgagcttaaattgccgtagccaaaggtgacccagatacctggatgggtttgctcctgacgtctgaagctgtttcagcctcttgtttggatctagtctgaatgaacagaatccctcattcctccctggttggggctggctgatctcatgggcagaacgggcaccaatccggttgtaagtgaccttgctctcttctggtggcttctctccctcagcgaccgctggccctgtcggtggtgagccagatgaaggacccgacttttgccaccttcatgtatgaactgtgctgtgggaagcagacagccttcttctcatcccagggccaggagtacaccgtggtgttttgggatggaaaagaggagtccaggtaagctcctgcgggctgccctgccccctttgtatttggggtgggaggccgccgtggaatctgggaacacagtcgatgttgaccacagtgagaattatttagcagacggtagggtccagaacctggttagactgcactcaagaaagagcagggagagcagaagaaagtccacacaaagagacgtgcatgtatggttttgtggttaagagatgccaaaaatgggtagtatctgccagggtgtctggggacgtgagggcactgtggcatgtgcctacagtcctagccactccagaggctgaggcaggagaatcacctgagcccaggagttcaagtttagcctgaacaacatagcaagaccccatcttttaaaaaattagaaaatttaaaacatttttaaaaacgaaatgaggcctgtcggcctggttatgtgactttctcaagcatgttctgctgccccagattgcagaaggggcaacgggggggggcgtctaaacagagttggggttttgccaaagggagagaggggcagaggcattggggtgttttcaagggagtgatacagagatggaccaaggaacctaagtgaggccacaaattcagggagcacaatgcaaagtactaaaggatcctaggtattgccagagttaaaaaaaaaactcaagagttatggtttcaggtgggatgagccgaaaaactaggaggcggtggccagacaagacgtgcttgccgtggggtgggtgggaggcgcacagtcggtagtaaagacggcatctggagtgtgacctttggggaggatgcctggggtagagtgaggaatgagcttgagacataataagataaacggaacagacttcgcagtttctcttaggtcagtctttgtgagtttgcgtcaggttttatgccactcggactgagggttgtgacacagacgtactctaagaaatgatgctgtaaggaagtttttctgaccaggccttgtggctcatgcctgtaaccccagcactttaggaggctgaggcaggtggatcttttgagttcaggagtttgagaccagtctaggaaacatggtgaaactttgtctctacaaaaataaataaataacaaaaattagctgggaatggtggcgagcacctgtagtccctgctactcaggaggctgaggcaggaggattacttgaacccaggagtttgccactgcagtgggtggtgattgtgccactgcactccagcctgggtgacagagtgagaccctgcctcagaaaaaaagagaagttattccaaaacacagcgatggagcacgccttcctgatgggatgtactctaaggacaaaacaaaaagcaaacatattaattaaacaggtttcagtaattatattgttggcagcactgttatgattgttactctaagatgctgcttgtggttgtggagtcagttaatgagtaattatgttgctgttgctggaaacatgagctaaaggggaaagagatgtaaagtcgggtaagtaaaagcctgcagttctgaatcgattggatagactcgtgacatagttgaaaaataaacacaaatatctcagttctgctcactgaaaaggcctaaaaacaaggaccaaccaaatgccaatatgcacccctaggacccagactgtggtctctaagtaccaaagtgaaccagggctcatcagaatcatggcagagtccaggtccggggcagggagtgcacctggaacatctgccaccctagaagcaaggacatcgtcagacttctgagggtgaattggaggaccttgggccagactggtcctgggaggctgggccgggccctgccctgctggcctagagacacacacgcggcaggtacctgagacagttccgctcagggctctgaagactcatcccagagggaagacagaggcctcttcctgtgacctgtgaaggttctttaaaactcactgcggcctgaagagagactcactcacaggaagggaggagggggctggctgggagcacacgggcagccaagcaggggagccaggatggaaccggacttgacttgagatctgtctgagaattaaggaaggaaaggaggcaggagaggcagggcagacgagcaggtaaacaggatacgcctaggacacaattccagttgcagggaacaggggcaattattctttatgactctctatatttttaactgtttgttttcaaagtaaaagctattcaaatatcttagttttgtttttctgatgcataaaaaaatgatgggaaaaggagacaaatacacctgaaggaagtttttgtttgctgtattttctaccatttctatcatctgcaaatacgttatcagtcaacagctttttaaaatttggtggcaggagaaactttatattgagaactgctatccgcgagcttaacatattctcttgagtctgagggacagagctgcgtgatgcggggtacataacttcccagccccatcagcttcagcctcctctgccatgcagtgagtgctcaggatgcccgccacagcctgaggggagacagcgatgccggggacagccggcctggtgagccaaggctctcgcaaatgacaagccattagttctcagagcactcgtgctgggagcacattttgagtgcccccccgccccaacccaatctcctctggaattctcccaacttgtctttagccctggctttgtctactctacagtgaggagctccccgcataacaggggcgggcaggatatggccggcgggagggcccctccttcgtactgggggcaaccgtctcaaccctgaggggtcacggaaagaggacagcctttcttctctggcgaatgcccttcctgcgggcgacggtcaagcattacccttcgggcagaacccggctctgccctctcagaacacaggatgcaaccctgggtgggagcaggggaggtagacgaggctcgcagctggcaggccaggctcagggaaaggaggcagcccctggcccccgggcactgacagcacagtttctgccacttacaggaactacacggtggtgaacacagagaagggcctcatggaggtgcagaggatgtgctgccctgggatgaaggtgagctgccagctccaggtccagagatccctgtggacagccaccgaggtaagcactgcccgcaggcctgcccaccgaggtaagcactgcccactgggtgcagccctgggtgggggccacattcataaaaatacaggacgccaggtcaagtgaactttcagataacccccagcgcatccccgtgcagtccccaagtaatgccaggagccccgagaagtagcagcctgtcaccaggggcagctcaaccctgcctgctgctggctggaggccgggatttgcgatggtgaggaccagatgtagaccctcagcaggagacgagacccaggaggctagggacgtgcctgtgtttcccataacactgctagtcactcagctctgaaggcctcttgccttcacatcagggaaatcagggaagtcactagaaggcccaaggaggggtcttctgagaagtcccgagacaactggccaaacacaaatgttctgaggcaggctaggcacaggggctcacgcctgtaatcccagcactttgggaggccaagataggaggatcacgaggtcaagagattgagaccatcctggccaacatagtgaaaccccgtctctactaaaaaatacaaaaattagctgggcatggtggtgcgtgagtgttcccagctactcaggaggctgaggcaggagaatcggttgaacccaggaggtggaggttgcaatgagccaagatcgcaccattgcactccagccttgcgtaccacttaagcctcagaaatctcagtgttaagaaacatctgacaacagattagccgaagtaggtgcagcccagtcccaggcatccaagagatgctcccacaacatttcctcctagaatgggcgagagcaagggctctgcctaaagcgtgctgttgcatgggaagaacagtgaacatttcctcctagagtgaggaaagcaagggctctgcctaaagcatgctgtctcacatgggaagaacagtgagaagacagcattgcggcgtgagtccactttgccagtaccaggtgcacacacaaataccacagagaacttctgagaggctgtgcccccagatcccaatgttggttttctctggggaatagatgacgggctattttctgtttcctctttagactagtctgtctttttcaacgtttctacaaagagcagaaatccataaacaacccaccagaacgtgtcaatccatgtaactttccaagacccataggggatccccaagtccaagtgcatcctcatgggaatggcttgggaaatgccagacactttccagcctgggtctcacagtggacctgtctgcctctgcaggaccagaaaatctacatctacaccctcaagggcatgtgccccttaaacacaccccaacaggccttggatactccagctgtcgtcacctgcttcttggccgtgcctgttattaaaaaggtgaggtcggggcaaaggcaggtatgcaggtctctgatgcacttccacgcctaggaggcgtctcctagctatgtcagggtggcgcctgcagagccacacctaggaccacctggcctaggacgtagacttagagacggtgggaggaaagatatcagacctggtccgtcattagtgccttccggtttgcaaaaacctaagtcaagtccccagccagactgcaggccgaatgaaaaaccccctttcacatgcaaatgccctgactcaggtggaaggactgttggtacaaatggcacggtgagcagtcatgcgtgtgcccttcccctatccggagcctcttccccacctgcccaggccagagccacctcacagccacttgatcaccaggtcctggaggtcctgatctccctccctccatctctgcctcccgccaagtactcgccgtcttacaccagacgcagtttctctttgtgcagcatagccctgcagactcagctctttaacctcctagccctggcctttctaaatgagaccccaaggggcactctccccattaaaggcccagccagctgtgctgcaccttgggattagccccagcctctatgaggctggcctccagtccctgctgggcccggcaccctccccacaaagcaccccactctgtgctgggcccttgacatcccagcctcctccaggaacagcccctccacgcacctcttcccagacggcctccgattcagttctcaagacccggggccttgtcccctcctttgagaagctgcccctcagtggggggcagctccctggcttttccgggctcctccgcccacaggattcaggcacggctcagccagctctggtttcatccaccctgaggggcctgtctgtgcataggcgccctcactaaatgcacaagaagcctttactggtgttgctttgttaaaatgtgactgtcatcatccaattccagtttgcccatctacaaaacaggtataagaagagacagaaggcctagcatacccaaaggtctaggccggtgtgcttggtaaatgagtattattattacttctggatggtcgcaaaatacatgaactcttctcttcacccttcttcagtttcatttaaaaaaaaaaaaaacaggtatgaaatgaaccttagagtcatttatgaccatggccccacagcgaggctacgcagcttgggaccaggcccgtaccagagcgcaggagaacacgacacaaagtgttattgaggccaccgctggcgagagcccccagccagggcaccacctcctgcacgaccagagggaataaagcctgctctgtgcagggcctcctgggcagggtgtctgccccctccaaggccgccagcgcgaagcctgcattcttgcacgcgcacccacgttcacacccagccgggacgtggcactcaccgccctggccggggcctgagccaggactgcagatagagacctggagcctgtttgccttggctgccttctttccctaaagtcctggggatggatttcgatacgctttcttagagcatgttgtcctggacagtgagctacgggtctccactccattgccctgcacagccagcctcctgagctcccccagctccccacaaggaggctttctgccctgccccctcactggcatgaggcccagctccctgctctgccctgactccagctttgttctgcagacctcttcccacccccaccacagccgacgcggtgtctaggctgcggagctgcactctgttcctggctctgccctgggaggtgccccggggcggtctggggtgggcccagcattcagcaaggtccctgcaactttggcctctgcccggtgacctctggcgggtgtagaagagctcatgcttcattgagggggtggggggcaccctgaggaccctgtcaacgtcagctgaaccacaggcatctcgatagatgtaagctgggatgagggctcagcaggctgagacaggcctccagaagagggttgagtaggaagcgatttcttccagaattagttcagcaaacacatgtcatccacttggagcaggagccaggtggagtcacagggccaccaagatgaaggagactgagcccttccctgtgccaggctagtgccacggggatgctggtgggctgggagcccatccttatggaacactctgcctggtggggggggtggcaggcagggggcagtgcacagatgcttgccatgcccccactgctgtcatgttaagcagcaccgagaaaagggcgggggcaccaggtcctgcctctgaaggaggccttggtggcctcaaggagaaggcagctccctgctgctcgccctgcaagaagctggcagaagcagaggcagcccatgtggtccaggtgacacgcagccttacttggtgccacaggccctgcctctgggtggcacattcctttctttgctgcagggatggtagatatggctctgcggagtcagagctgcacttctttaggagtagccccggcctttctaagagatttgctgccctgaggcgcactggtggaaagtgactgcccgcctggtgtgggtgcagatgagtccagtgcctactctgtgtctctcttggaatgtgtgaaatggaaggatgtgacacatccctgtctccttccttcagaattcctacctggtcttagcgggcctcgccgatgggcttgtggctgtgtttcccgtggtgcggggcaccccaaaggacagctgctcctacctgtgctcacacacagccaacaggtccaagttcagcatcgcggatgaagacgcacggcagaacccctacccagtgaaggccatggaggtggtcaacagcggctctgaggtctggtacagcaatgggccgggcctccttgtcatcgactgtgcctccctggagatctgcaggcggctggagccctacatggccccctccatggttacgtcagtcgtgtgcagctctgagggcagaggggaggaggtcgtctggtgcctggatgacaaggccaactccttggtgatgtaccactccaccacctaccagctgtgtgcccggtacttctgcggggtccccagccccctcagggacatgtttcccgtgcggcccttggacacggaacccccggcagccagccacacggccaacccaaaggtgcctgagggggactccatcgcggacgtgagcatcatgtacagtgaggagctgggcacgcagatcctgatccaccaggaatcactcactgactactgctccatgtcctcctactcctcatccccaccccgccaggctgccaggtccccctcaagcctccccagctccccagcaagttcttccagtgtgcctttctccaccgactgcgaggactcagacatgctacatacgcccggtgctgcctccgacaggtctgagcatgacctgacccccatggacggggagaccttcagccagcacctgcaggccgtgaagatcctcgccgtcagagacctcatttgggtccccaggtacgtttcccgaggtgagggcaccatccagggcacgcccactgctcctgctctggggacagagcaaggggaagccccctggcttccttacaggtcatgtggggaggcaggtgctgttcttccaagagggttggtttcctccattgggaatggaagcgatcgctttagcaaatctaagagtggccgcacaaaagcttattgcctgccagagagcttaaggtgccacacaaggaaagccacagtcaactgtgactcagtttccactgagaaaattctcctctgctttgaagtctgtcccctccccataacttaatcccttagcagaaactgcatgtctgttgcctccctcccgcacctttctgcacaccggcttcactccccggagagcacggctaccgacaaatcgcttccccttctgggttttggttgcttaggcgcggtggagatgttatcgtcattggcctggagaaggattctggcgcccagcggggccgagtcattgccgtcttaaaagcccgagagctgactccgcatgggtaagactgagtggcagctcctttaggacccaggcagcagcatgagcacagaaggccctgcagccaggtcctgcacagtggctttgctgcccttccattctcccaaatagcatagccactaacgtggctgtaaggcaaagtggaaacaagatggggcccctcagacagctcctaggggctccgcactggccatggctgcctgtttctggagtacccagtgcacctgtagatcaagtaccctacctagtaccctacctaacgaatgtctccagggccagagttcagctgcaatcgacatgcagatgcatccaggtcattgattcactgttcttcctgccaagcaggaaaccctacccgaggtgtccaccagcccacacagcaccctatggggacagatgacacaggcacaccttgtcatctccaagcctggggtctcagctcctgcccttcctgggctgagacatagctcagtacctgtctgtgggtggggacccccaggattatgccagtctcctctgtgaaggtatgctgggcagggtggcctgtccgggacatggtctacatggttgcagtgatgtgaggctggcgccagctgcagctccccacagtgtttacaccccgcactttgactaccgagccccacacggtaaatctcccctacgaaaagtcctcagttcaaatgtgtgtgtgtgtgtgtgtgtgtgtgtgtgtgtgtgtgtgtgtactttggagctcttccatttcacactaggcctgtttccctgcagcatgagttatcccccatccctgggcaagtgggtttttatttcatctggagcataagagggtggagaaacaccagtcagcttgcttctcccaaagcaggacaatgacaaggacatccttggcagtcgcactcccttgcctgccagctttgaacttttgcagtgagtcctgggccagtgacccttactctgtaagtggttctggaagcaagatctggatctgctcctgagctctggcagagcctgtgggtagaagccttgaactgatggagttcccagcttgcaggtcgggcttctggaggaaatgggtgtgcagcacccaggttaggaccttggcatacctgccattaatgtcctaacgtttagctgttgtttttctcctattcatccctaaagccagattttacctctttctcgctagagggaggctcctcccctaaggggaggtcctggcaaggccacgcggagtgagaggtccctggacatcccagtttgcaggagcacctcagtgccacgcaggccgcacacacgggacacagagggaggaaaggcaattagtatgtgcttggggtggggcaccaccagggcagggaggccacactgtggcccaaaaggaaacctgtagcacacacccaccgatcctgcaaaactgtccacagtttcaaaaaatgtatatagtgatgactttggggcagtaggttttccatttaatatatgatcctgtatttcctaagcctgtagaaacagaatgagagaagaatcttactgagcttagtggcaagggagttgagttaaactcggtcatgagccattcacaagcagaaatttgggtcagtggtgttttctggacgctttgggagctgagtcaaggatgcatgatctgattgcctctgtggccttccagggagtctgactcttacagacaaagcccatggacgcgaactcatgcccacagcccgtctttggactttataaagcctaagcccacaggctggccactggggagaagtggtgcatctcagcacaccccagagagggctggcaagcagacacactcccctgcccttagccagctccgccttcctcagaaggcacagggggagggtcccaaccccacccgagtgggaacccctgtgagtttcctcagacccccttctctctgcagggtgctggtggatgctgccgtggtggcaaaggacactgttgtgtgcacctttgaaaatgaaaacacagagtggtgcctggccgtctggaggggctggggcgccagggagttcgacattttctaccagtcctacgaggagctgggccggctggaggcttgcactcgcaagagaaggtaattcctgtggaatgactgtcacacatcagagctggctggcccggggctgcagcctgacccctctgccatcggcctctagttctccaaggacctagaagacagatggagttctcccctgaactccttgctgctaagaagtgctgagaagttactcgcctggcggtggctccagggttctctggttctctggagcagagttctctgaataccccatcccccaactgctgattttacagccccagggaagacagtggtatcaggctgggagcggcctcctctggcctcccccatcagtttgcaggagcaggggtgcaggatcctgttctgagctgggtcaaacaaagcagggccgggccttcctgccatccccaggtctcagatggaattacactagaggccctccgctgggaagcacttgaggtagggcaggaggggggctgtgacccctgccctttccccgccagagacctcaggctctcagcacattccacaggctcctgagtccccgaggcctgggccagcttgggcaagccaagatcagatgtctctgtgttcgggaaggtctccgtgtgggaaagcccttgggggatcccgggtgaggagtgttgccccatccagagaatgaatgagttcctttaagtgccaccgccagcaagcccagaggcacacagtccgagtgcacccgcttagcctttacattcctctccaccgacaaaaggaaggggaaactcaatcagcaggacttcagaaagggccttgtgtttatagctttgtcaagtaaatttggacgcagctggagcacaggccctgtttgtttgcacataataatcttgtttatcactttaaaaaattcagtaatatctcagcagtcaggcttctggttgtgaaatcacattgtatgggatttataccaaattatgtatttgctaaacattcactgcacacgtgtacagcggagtacgaaaaggaacgttgtccacaggggatttatggatacaacagcaaacattttataaactatgcacatgcattacacacatgcacacacatatgcacacacatgtgcaaacatagccacttttttgtcaagagttaccctttggggctccttaaaccagaatgggagtttgaaagagagatcatactccagctgaagtttgttgacccttttctaaaattaaaaagatcaaatttagtatttgctggatatgcagggagatgagactcttttaatctcaaaataaacagattctttcaagaacgaagctgtggcctctgtcttttgagcgcttatgaccacagcacgggctcagtccctcccagacccactcgctgtctggggataatgggcagcccctccttgcccactgtgccaacatgcaggtggcccctgagcagcttccatgggtggagacgctgctctgtcagtcacaggcttggaaaaagcgagtccccccactcttttttttttttttttttttttttttaccaacctgggcaccaagtcccagggggctgagggtctgtgcttcctgtctacctccctgccattctctcaccctcatcccacagcagggtctcaggagtcccactctccctctcctctcattccagtgccccacaactgcccagttaacccccagatgcaagccagattccatctgccccaggccccaagcttttgctttggcatcacgcgaggccaggctgctttgcaggcaccaaaattcaccctctcctactcctggaaaagcccagccccaggcctcacagagccaggggaggggatctcatcacatcacagttagaaatcatacaggcctaaagtcccagctacccaggagccaaggcaggaggaacccttgagcctgggagttggaggttacagtgagctatgatcacaccagctttctagcctgggtgacagagcaagacccaactcttaaaaaaaaaaaaaaaatacaggaaatgactaatgaacttgactccatgaaattgaaacttacgtggaaaattagtccaaagcctaaaagactagcaactgagaaaaaaaaacattgcaacacaaatgagagacaaagacctcacttatcttcattacagagagttcgtaatgtcaataagaaacagaaaaccggaaaggcaaacaggttaagggcatgggcagcaattgaattacaaagaaacagacagacccttaaacatcaatgcttgacctcacccaacagcagggaaacagtctccacaacagtaaaatgttgctgggatgggcccagcattcagcatggtccctgcaactttggcctctgcccagtgacctctggcgggtgtagaagagctcatgcttcagtgagggggtggggggcaccctgaggaccctgtcaacatcagctggaccacaggcatctcagatagatgtcacttaccaccctcatgttggcagagggtggtaaccagccagcatctccttcttaaacacctactaagtgtcaggcactgtgaccggagacacagtcaagaatctctgtgttttttttgttttgttttgtttttgttttttgagacggagtctcgctctgttgcccaggctggagtgcaatggcgcgatctcagctcactgccacctccgcctcccaggttcaagcaattctcctgcctcagcctcccgagtagctgcgattacaggcgtgcaccacaatgcctggataatttttgtattttcagtagaaacggggtttcaccatgttggccaggatggtcttgaactcctgagctcaggtgatccgcccgcctcatcctcccaaagtgctgggattacaggtgtgagctacctgcgctggccgaatctctgcttttaggagctcactcctcataggtagagttgacaataagcacacaaacaagtgagatagcagggcagccggaccacccagttgggcaattcgtggcttggcctaggaacgttacatttgactgaggctggcgaggcctgcagcctgcaccaggaggtacaatgtgagactgaggaatgggaagaaggcattccatggagctctgagggcactgggtgcaagggccttgcacatgcaaagaccctgttgtgggttcaagccactgtgtgggagggacaggagagcctggcgtggctgcggccttgaaggaggggactgtgcacacagaattgcaagtgggggtctccgcggaagctcctggcagttttaagcaggattattagatgattcagtcaactttacaactcactttgctgaatggagggtggattaacgagggggtagttggaggctaccccttggagggcattctggacttatctaccaaaatttcaaatgcacataccctctgacccagcagttccacttaagtatttggtcctgaaatcttggtaaaagtgcccaaagatacagaacaaggatgttcactatagcatctcttagaatatggccccaaacaggaagcaaccccaacctctatcatgagggaggtcataaaattcctgcacatgcaacagtgccatcctctgcagcctgtcaaagaggcaggcagcactaactgctggactggaatgttctccaagatataataaatgcatttgtttgaaagcagcttgcagcacagtgcgtcaggcctctgagcccaagccaagccatcgcatcccctgtgacttgcacgtatatgcctagatggcctgaagtaactgaagaatcacaaaagaagtgaatatgccctgccccgccttaactgatgacattccaccacaaaagaagtgaaaaaggccggtccttgacttaactgatgacattatcttatgaaattccttctcctggctcatcctggctcaaaaagctcccccactgagcacgttgccacccccactcctgcccgccagagaacaaaccccctttttcctttacctacccaaatcttataaaacggcctcacgcctatctcccttcactgactcccttttcggactcagcccacctgcgcccaggtgaaataaacagccttgttgctcacacaaagcctgtttggtggtctcttcacatggacgtgcattaaatttggtgccgtaactggcgcggggggaggggggggggaacctcccttgggagatcaatcccctgtcctcctgctctttggtccatgagaaagatccacctacaacctcaagtcctcagaccaaccagcccaagaaacatctcaccaatttcaaatccagtaagcagcctctttttactctcttctccaacctccctcactatccctcaacctctttctcctttcaatcttggcgccacacttcaatttctcccttctcttaacttcaattcctttcattttctggtagagataaaggagacacgttttatccgtggacccaaaactccagcgccggtcacggactgggaaggcagccttcccttggtgtttaatcattgcagggacacctctctgattattcacccaggtttcagaggtgtcagaccacgcagggacgcctgccttggtccttcacccttagcggcaagtcccgcttttctggggaatgggcaaggaccccaaccccttctctccgtgtctctaccccttctccgcctttctggggggcaagaaacccccaaccccttctccttcaccctgagcggcaagtcccgcttttctagaggaggagcaagtactccaacctcatatctctgcgccccaatcccttatttctgtgccccaacctcttatctctgtgccccaatcccttatttccatgcccccacctcttatatctctgcaccttgatcccttatttccacatcccgacctcgtatctctgcaccccgacccctttcccacttttctggagagtaagaacccctgaaccgcttctctccgtgtctctactctcccttttctttaaacttgcctccttcactgtaggcaaccttccactctccattcctccttcttctcccttagcctatgttctcaaaaacttaaaacctcttcaactcacacctgacctaaaacctaaatgccttattttcttctgcaatgccgcttgaccccaatacaaactcaacagtagttccaaatagccggaaaacagcactttcaatttttccatcctgcaagatctaaataattcttgtcgtaaaatgggcaaatggtctgaggtgcctgacgtccaggcgttcttttacacatcagtccctccctagtctctgttcccagtgcaactcatcccaaatcttccttctttccctcccgcctgtctcctcagtcccaaccccaagcatcgctgagtctttctaatcttttctatagacccatctgacctctcccctcctccccaggctgctccttgccaggccgagctaggtcccaattcttcctcagcctccgctcctccaccatataatctttttatcacctcccctcctcacacccggtccggcttacagtttccttccgtgactagccctcccctacctgcccagcaattttctcttaaaaaggtggctggagctaaaggcatagtcaaggttaatgctcctttttctttatcccaaatcagatagcgtttaggctctttttcatcaaatataaaaacccagcccagttcatgcctcgtttggcagcaaccctgagacactttacggccctagaccctaaaagcccaaaaggccgtcttattctcaatatatattttatcacccaatctgctccctacattaaataaaactccaaaaattaaattccggccctcaaaccccacaacaggatttaattaaccttgccttcaaggtgtacaataatagaaaaaagttgcaattccttgcctccactgtgagacaaaccccagccacatctccagcacacaagaacttccaaacacctgaactgcagcggccaggcattcctccagaacctcctcccccaggagcttgctacaagtgccagaaatctggccaccaggccaaggaatgcctgcagcccaggattcctcctaagccgtgtcccatctgtgcgggaccccactggaaatcggactgtccaactcacctggcagccactcccagagcccctggaactccggcccaaggctctctgactgactccttcccagatcttcttggcttagcggctgaagactgacactgcccgatcacctcggaagccccctagaccatcacggacgccgagctgccagtaactctcacagtggaaggtaaacccgtccccttcttaatcaatacggaggctacccactccacattaccttcttttcaagggcctgtttcccttacctccataactgttgtgcgtattgacagccaggcttctaaacctcttaaaactccccaactctggtgccaacttagacaatactcttttaagcactccttttagttatccccagctgcccagttcccttattaggctgagacactttaactaaattatctgcttccctgactattcctgggctacagccacacctcattactgcccttcttcccaatccaaagcctcctttgtgtcctcctcttgtatcccccgaccttaacccataagtataagatacctctactccctccttggtgaccgatcatgcaccccttaccatctcatcgaaacctaatcacccttaccccgctcaacaccaatatcccatcccacagcatgctttgaaaagactaaagcctgttatcactctcctgctacagcatggccttttaaagcctataaactctccttacaattcccccatttcacttgtcctaaaaccagacaagccttacaagttagttcaggatctgtgccttatcaaccacattgttttgcctatccaccccatggtgtcaaacccatatactctcctatcctcaatacctcactccataatccattattgtgttctggatctcaaacatgctttctttactattcctttgcacccttcatcccagcctctcttcactttcacttggactgaccctgacacccatcaggctcagcaaattacctgggctgtactgccccaaagcttcacagacagcccccattacatcagtcaagcccaaattttttccctatctgttacctatctcagcataattctcataaagacacacgtgctctccctgccgatcatgtccgattaatctcccaaaccccaaccccttctacaaaacaagaactcctttccttcctaggcatggttagtgcagtcagaattcttacacaagagccaggaccgcaccctgtagaccttctgtccaaacaacttgaccttactgttttagcctagccctcatgtctctgtgcagcggctgctgccaccctaatacttttagaggccctcaaaatcacaaactatgctcaactcactctctacagttatcataacttccaaaatctattttcttcctcatacctgacatatatactttctgctccccggctccttcagctgtactcactctttattgagtctcccacaattaccatttttcctggcaccgacttcaatccagcctcccacattattcctgataccacacctgacccccatgactgcatctctctgatccacctgacgttcaccccatttccccacatttccttcttccctgcttctcaccctgatcacacttggtttatggatggcagttccaccaggcctaatggccacacaccagcaaaggcaggctgtgctatagtacaagccgctagcccgcctcttagaacctctcatttcctttccatcgtggaaatctatcctcaaggaaataacttctcagtgttccatctgctattctactgctcctcagggattattcaggccccctcccttccctacacatcaagctcagggatttgcctccacccaggactggcaaattgactttactcaacatgccccgagtcagataactaaaatacctcttattctaggtagacactttcactggataggtagaggcctttcctacagggtctgagaaggccaccatggtcatttcttcccttctgtcaaacataattcctcggtttggccttcccacctctatactgtctgataacagaccagcctttattagtcaaatcagccaagcgttttttcaggctcttagtattcagtgaaacctttatatcccttacagtcctcagccttcaggaaaggtagaacggactaatgatcttttaaaaacacacctcaccaagctcagccaccaacttaaaaaagactggacaatacttttaccactttcccttctcagaattcaggcctgtccttggaatgctacaaggtacagcccatttgagctcctgtatagacgctcctttttattaggccccagtctcattccagacaccagaccaacttggactgtgccccaaaaaacttgtcatccctactatcttctgtctagtcgtactcctattcaccattctcaactactcatacgtgccctgctcttgtttacactgccagtttacactgtttctccaagccatcacagctgatatctcctggtgctatccccaaaccgccactctgaactcttaaatacataatctttgctggcaggactatgctgaacctcctttggcactctctaatcagatgtcctgagtcatctcaattcttagaccttttatacctgtttttctcctttacttattccgtttagtttttcaattcatacaaaaccgtatccaggtcatcaccaataattctaaatgacgaatgtttcttctaacaaccgcacaatatcaccccttaccacaagacctcccttcagcttaatctctcccactctaggttcccacgccgccccgaatcccgctcgaagcagccctgagaaacatcgcccattctctctctccacaccgccccccaaaaattttcgctgccccaacacttcgacactattttgttttatttttcttattaatataagaaggcaggaatgtcaggcctctgagcccaagctaagccatcgcatcccctgtgacctgcacgcatatataagcccagatggcctgaagtaactgaagaatcacaaaagaagtgaatatgccctgccccaccttaactgatgacattccaccacaaaagaagtgtaaatggctggttcttgccttaagtgatgacattaccttgtgaaagtccttttcctggctcatcctggctcaaaaagcacccccactgagcaccttgccgcccccactcctgcccgccagagaacaaaccccctttgactgtaattttcctttacctacccaaatcctataaaacggccccacccccatctccctgcactgactctcttttcggactcagcccgcctgcacccaggtgaaataaacagctttattgctcacacaaa

SEQ ID NO: 233 - DNA, 252175 bp, Homo sapiens
  source 1..252175: mol_type = genomic DNA; note = NC_000010.11:119207571-119459745 GRK5 [organism=Homo sapiens] [GeneID=2869] [chromosome=10]
agaagcatccgaggcattaaagcatccgagggagccggaggggaggagaatggagtgacagagacacgcggagggtggggggtgggggggagcgtgttgagggaggggggaggggggacacagagggaggaagaagcggcggcggcggcggcggcggcggcggctcctctttgcagagggggaaactcttgggctgagagcaggaataatgcggtaggcaaggcgggctgctggctcccccggctccggcagcagcggcggcagcccgagcagcggcagcagcagcggcagcaccccaggcgctgacagccccgccggccggctccgttgctgaccgccgactgtcaatggagctggaaaacatcgtggccaacacggtcttgctgaaagccagggaaggtaagaggcagggccggtacgtgcccggcgcgtccgccgcgggccagggtgcgggtgtcgggtggcgtgcgggctggggctgcgcccgtgcaggatgcccgctgccggcgagtgggtcgcgagcaggacacttcggagagcggctctgcagacccttcagggttcctgccttggggctcagagaatctggacttgggctgagaaggttgcagggatttggatgctaacatatctcctagtttccagcgctcgccctgcagagcgtgccatctcggcagctgttgaaaggtcagttggaaaagcattcattcggggagcgacgagcaaacatgcacataaaatagcgtttcaagtcggcccgggatggttctgtgtgaactggtgtgtgtgttcgaggggcgggggtggaatgagcagaagccaagtctttgcctgcgcaggctgagttgatatagactattgctggaaaccatccgctgggatgtttcttagggaaatcccgtcgtgtggaaggaagccttttaaaggcaaagtcagatgttgaggaattagccttttcatagaattatcaaaggatggctgtacagaccacctagaaaataattcagtatttcaggtttttcttttctgggagtgtgataactgaaattgttagattttggctcagttaagaaaagaaaggtaagtgtgctggtgctttagatacgttttctatgcaaatcattagatttcctgcatttagctggcaggaaatattgtctaaatggagtgtgtaagatcctgagtcaaaccctaagaacgcatattttgactcttccttttgatgaaaaacagaaaaaaggggggggaggcagaaacttgggtgcttcctgaaatgattgtgttgtgtccatgtaaacatatgtatttaggaatacctggaatttatgtcgcatattttccttttttttttctggtcaagatttgagctctagtgtgcgacctttttcataaaaggggaagaggtttttccctttcacgggagaacgctttatttgatacaaggtagaaggcagactgagtaagggcttgagtttagaaggatactcggtgagcagcccatgaaaatgtcttacctgcttaatattttcattcacctactttgatgaatgaagggaagaatttctggccagcaataaaacgattcgtgtttattcagcccgttccatcaccttgtggctccctacacactgtgggggtaggtgatgcatagccttccgtgggcagcgtttcagcaactcaacccggcattcgtgtcttactttcgtcgtcacttgtcactctaaagcagccagtgggcaagaaggtttatttcagaagccccgaagggaggcagtgctttgaaaaccccagcagagtttaaaatattcaggttagtctccctcccattgcttagctttggtgggaataaatttttaggagaggcttgttacttggtgacttcaggttctaaggcctgagctgtgtgtgtgtgtgtggtttttttttttttttttttttttttttcctaacctgacatttttagtggacaggatctaggtgggtgctggtaggctctcctctgggttggggaatggtcctgaaagggaggaagcagagaaaacagccctccacctcccccgcccctctttcagcctttgcagctggccacctagtggtgggacacggttgtgtatctcaggattcgggggctgggaaagttttcactctcgctccattctgaaattatttcttgggaaatcactgggtctgatggtactggagccttgcaagtttcgctggttcctcctgttgcccagggaatctgcccccgacatttgctgctgtagatatttgtttgcctgatagatgctttttttcttccctgagcatttggttgcttcttttataatgctttgcttagagtgggcaaagtgatatcaattccacccgccccctccaaattgttctccccagtattttttcaccaacgtgaatttactgtctgatattgttgttcgttaggccaacaaattgggtttttttcccagagccttggagaagagagctgcaggctggaagcttgtgtggagtgaccgactcccattggggcagaattacagtgattgaaagtgctcaagaatgtgcctttcacttttttttttccttttaaaggctttttcaattttgctgtgagagtttggtcgtcatctcatggtgagaaaatagctcttgatgatgccttggaaatggagagggcctgcggaagcagggagagactgacacgtgaacaagaaaaattaatcatttaatggaaacctcatttacaatttgcatctctccccttctttctctcttatgcctagaggaaagccatgattttaagtgcttccagtttcttttggctgggcctttattagagacttgagcccatatatcctaattagtgtggacacttttagaaattaaagcaatttatgtttctcttctcagttctcatatatttgaatttattttactaaacttagtagttctccaaataaccatattatctaaatattcagaaatgaaatcttcagtcagtttagtgaaatatctaatataaaacagtatattaaaaaaatctgagttgtttaaaaggtttaaaaacacttcttaaagattcttgtcagtggttacagatgagaaatataattggcaaatgtgaaatttaatttagttcacttaacaaaatacaccgtaagcaatttaaaatttggctttcaagtaaaagtcacatttgtcccaaacaatagagaaacagaccttgaagaaagacaggcacactttgaaaatgctgtaaaataatttgtagttgtccatgttggtgggtaacactgggacctatcttttctttttgttttgcattaaagacagatggctcctaaattcactgtatcttcaaagtcttaccgtaataagacataatataaagtggaaagcattaatgtagcaataaaatagaaagcctgtaagtggattagagtaaaatgatggattgttagtaattagaaaatatagcaagcaagcttcatgaacacttgtgataattattttaaaataagaaaaggtagaggtatgggttcaagattttgaaccacggaaatgtattttggggcctgtttatttgtcctgggtctcatgagaaaacatcaactcgatcactcttaggaactttagattgctctcctaaaaagtgcttaaggaaaaaaagaaagaagttgagactgaattcatggcaatttatgggaatgagctaagtgattaagcatttcatgaaaaagaggcccagactaactctatctatttatttacatttcagaatctcagaaaattggcaggcgacctaatgttgaaataataatgagaaggagagtttgctgagtgccttttgtgtgtttctttttggttttattgttgcagtaaaggtttttgtgtttttctcatcttctagatctgttgcctttcttctgagtgaacagtggtgagaaaaaattttgcaaggccccgcttttcctttcttcacaggccagcagtagccatatctgatcaaaaaagatacctgaaggaatattgatcacattttcctgaggccctagcaagcacaggaattgagaagttaggactggaacaactttgtcatttgtcacaattgccaaacattagaatacacaggaaccgttttttcaggtaactctgtgacttggctggatcttcctgatcatcaagattagcacctcggggcctggaagaggttagggagggcaggaagaaggagtgagccagcatccagctctgcgtggggcaggctatggcgtggacagacttaacattccacagcacggctgaaagccctggacctctttcccttgcacccctaattcatggtgataaaaccaaaacatggtgaattaggttattagaacgttggaacatctctgaagctcaaagccctcttatggctatgtgaaggcatacgtggaggcatacgtactccaccctgaagcttctccttcaattttaatgttaatcttaccaagcgacagctttcatcctggttaaggcagctcggtgtgtgtaaaagcagcctggcctgttaaacacaatgccgttaaatcaaactgcctttctttttttttttttaaagtttccttttcagtactgacaacttggaggtagagaaaccaaaagcaatgttttcagaaggccttttgctttcttaaagatttcaaacgatgattgtagttaatctggctgcctgtttgaaaaaccatcagataaatgcccacaaggctctcatctttcagtagcttagctgctgcttgtcagattctaaactccaaagtgcttgactcttccagtgcccaaactaatccttgtttaaattatgtcttcagaagctataactcttatagtggcttgctaaatgataccctttggatctgggctgaagacttccagaatgcccaagtgaatttcaggagcgggctcaatgtttaaccaaattcacctttaccaagggctattcaatccatatctgggatgttttaaataaaactatccaggactgtgggcaatattcaaagttaatatttgttgccaatatgtttggagtgcaagataaagcattataatgtctagacatttttgaaataaaaaagtcttctggttaccaaaaggcattattgtcataggtcatgcaactcagaggtgaaacttgagaaaacagaaagtgactaccaacaggtgacacattgagaagataattaggaatttcctcaatcatacagccctcagcacccatttctcacatcaaaatagaatggtggagccgagtgcggtggcacagcctgtggtcccagctactctggaggctgaggaagatcatttgagcccaggagtactggtctggagcgaactatgcctattgggtatctgcagtaagctcggcatcaatatggtgacctttcgggagtggggaccaccaagttgcccaaggaggggtgaactggcttggtgggaaacagaacaggtaaaaactccatgctgatcagcagtgggactgcatctgtgcatagccactgccctccagcctgggcaacacacaagaccctgtctctaaaaataaataaataaatgaatggaatagaagagaatattgaagacaaggggatgaaggcatgattttaaatgactaaaatggtctgggcatggtggctcatgtctgtaatcccagcactttgggaggccgaggcaggcggatcacctgaggtcaggagattgagatcagcctggccaacatggtgaaatcctgtctctactaaaaatacaaaaatcagcggggtgtggtggtgcccgcatgtaatcccagctactcggaaagctgaggcaggagaatcacttgaacctgggaggtggagattgcagtgagccagtattgcaccaccgtactccggactgggtgacagagtaagactctgtttcaaaaaagaaaaataaaaaattaaaatgtattatggccttaaataatagggttgatttccactttaaaacatatcctgttatatttcagtgaaaatttttatttaaaaatattctaaatattgaaaagatgtattttgggggggcagagataatgtcattccttttattaccatccaaaaactggaagaagcatttcattttgtgaaaactgtgctgcttttaaaagagaaagtccttacttcctgactggacccttcccccacccctgcttctcattttgaggaaaccattcttgaataggcttctgaaaatcttacaagagtaaaatttatttgttcagcatttggttgttgaaggacccagtgcggaggtgacattcgggtgtcagcctcagataatacaatgtgaaatgactgaaaagatgcaattgggcactgccgttctctttttacatgtttttttgtttgttttttgttttgttttgagacagagtctgctctgtcgcgcaggctagactgcagtggcgcagtctgggctcactgcaacctctgcctcccaggttcaagcgattctcctgcctcagcctcctgagtagctgggattacaggcgcccaccatcaagcctggctaatttttgtatttttagtagaggcggggtttcgccatgttggccaggctggtctcaaactcctggcctcaggtgatctgcctgccttggcctctcaaagtgctgggattacaggcatgagccactgcactcagtctcttttgatgttttttaactgatcaactaggtgtgaacagaactggatttttttccccgaagagctgaggctgactggggtgtgacctccttagctgtgtagactgcattgactctactgtgcctagaatttggacaatggcctgagggaccagtatgtgatttaagcataattaaaaggttatacttgagggatagacctgaatctggaagacaactgctaattttctggggcactgaggggtttttgttttgttttgttttttgagacagggtcttgctgtcacccagtctgtagtgcagtggtgccatctcagctcactgcaacttcgacctcctgggctcaagtgatcctcccacctcagcctcctgagtagctgggactataggctcgtgccaacatgcctggctaatttttgtattttttgtagagatggggtttcgccctgttgcccaggttggtctctaaactcctgggctcaagcaatccatccaccttggcctcccaaaatgttgggactacaggtgtgagccaccacgcccggccaacactgtttttatgaaggtctgttcctagaaatggaaaccattaaaaacaatggcaagaagaccctttggttgaggaatgacaagatccaagaggaaaactggtgtgccatggcgccttccaggcagagcaggtgttcagggcagaggcctgggcgggtagacgggctgcagttctggagtgaagacggtggaggctgcattcttttctggctttctgttgggattggcctgggtatgtcctttgacatagcctgtcacagggaatgaccgaaaagattaaaggtacctgttcctcttcaggggctctgttcaacgtagtagccactagctgtatgttgttatttatacttaaattaattaaagttaggaattatgttcctgaagcatgcaaaccacatgtctagtgctcagtagccatgtgtggctagtggccattgtattgggccatgcatatagaacattcccatcattgcagaaagctcatcgggacagagcttctctagaggattctgtgcatttagtgagtgtgataaccccatgacttctgacatgaaaaattagggaaaattaaaagaagcagagggaggcagggagttggggagagagacagtgtggaggagggggagaaggagagatgagagggggaaatgggtaggagaaggagaaaatagggaagggggtgcggagagtgaggaagagactgaggaaggggagggggctgcaccatggaggaggggtgaaggcaggggttgggagttgggactgactcacctaagaggaaattcaggtcagggacaatcatggatggtggcgggggtggagggggttaagctaccatatcctcccccaccccctttttcaatatcttgttgggaaatttgcctaaattgagcaactgactttcctgattcaaattaagtgcatgatatagatacatacagagccccatgttccttcttgaaattcttaatgtggggctattttaaagcagtcattttatttaaaaaaacaattaagttgcataagtgcggcagatctacagaaagaatagaaagaaacctccacaggcaggtgatctaaaatgggggtgaagacaggcaaaaccattttaagggttttcattttttctgagctgggaagacatcaggaagaaggtatacttaaagatgccaaagaaactcactgttcttgtatccacttgaaaatggttttctccttaaaaactgtttcttgtgagatttgaaacattttaacaataactcagagcacacttagaaagaaagtgtttgaaacaataaaacagttcattgcttgttccctggtgtccgaagcaagggagtctatctgacgtaccagagtcaactggtgacatcctcctaaactaggccagttttgatagggcctactgtgtttctaagaacttgtaatctgtggaatatcaaaaatttttttaaaaaggtaatgatgaaatgaaccccaaggacagcttctggggcctgtgcagaaagcaagggtaaacagataagctgagataaacagataagaacatgcctctgtcctgaagtggcagaggccacagggccactggtgcctcggcttccctgagccttctcagctgatctgctgccctgtcctctgtttccggcatagaggttacccttggtttaacggatggggaaactgagatgaaagaaagggagtcagggccgggtgcagtggctcacgcctgtaatcccagcattttgggaggctgaggcaggaggattgcttgaggccaggagttcaagaccagcgtgggcagcatagcaagacccctatctctacaaaaaataaaaaataaataaaaatggccaggcgtggtggctcacgcctgtaatcccagcactttgggaggccaaggtgtgtggatcacttgcggtcaggagttcaagatcagcctgaccaccgtggtgaaaacccatctctactaaaaatacaaaattacctggatgtggtggtgggtgcctataataatcccagctacttgggagactgaggcaggagaattgtttgaacctgggagtgccactgcactccagcctgggtaacagcgaaactccgtctaaaaggtaaaataataatttaaaaaaaaacataaaaataaaaaaagggagtcacttgttcaaggtcacttgaactgtggacttttggggagcaattgcaagtggatctcccctatcctccaaagtgcttttatgttccaaaataaatctttcttccttcctctcataatatatgccaaaacaacaaactcttctcgagatggtagggtttttaagtgtaaatacccatgaggttgtaattgtggaagagaaagagtgtctttgtcagattccctgggaaaaggggcaaattgggaatataatttctgtctcagaccgtgatttcagctgagggccagtttgagagcagttgggtaaattaattcctactaggttgtaaatgactgataggtgaatcctcaaagtagatgtttccattttaaaagtagaactgtgtatcaatacaactgaatctgtgtttgaggacaaggcaggatgcctacatgccatacataagtgcctgtacacacataagcacatgtgtacgtatgtggtatgatcgcctgtggaggcccattacctgtactctctcgctgcctgggcccctcctaccaacacatcggacaagcgaggccagcctcttgcgttatttttcccctcagcatggctagtggccaacgaattgcccccaagggactggatgtgaagccccatgggtggtggtggtggggacagtcatgggagtttaggtgtgggccacatcattggcagcagcaccacctcctttccttggcagaggcaagaggtgggcagcgggcatgccagttcctgctggctcaccacacatagctcccatctgccctgcaccctgcttccctggccgcttactgctccttaggaggttctcgccctcagttacctctgcctgacagtggtaccttatgtgcaggctcaggtttctgcagctctctttacttactacccaagtagggggttagagagggggaggcgaggagggtttttcttgcagattgcagggcatccccaccccctcaccaaagagagggtatgaagtggccttttcccccagaaaagctctctccggatgaccccttgccatttttcagtggtaaccttgagtgtttgcatttagaaaccatgtcaacccgtttgtgtgtgtgtgtgtgtgtgtgtgtgtgttgcgttaatgttgcaactctgcttttcagggggctttgtgaggcaagggagtgtataagagccatgcacttccttgggggtccacagtcagacttgagatcctggtgggaaggcagcctggtgtcgctccctgatgatgagggtacaggaagccatgcttttgatctgctcctgcagagaaggtgtagctctaaacttacccactccaggaagggaaggggagggggtaggagatagaattacccaactgctggatggagagaacccagccaatgtaattgctctgcaagtctgataaaaagtcttgtgaaacctcatttgaaaatggaattccatcctggcatgggtcttagcactgcttctgaaatggaaacaagctggagaaggtcgacaaatgtcccaggaagaacagctttaagtggctgatgcagaaatgggtcctgcttggtcttaatgttttctgttaatgcactcaggaggggcttgttgggatatgtagataacatcccaggagaaggaactcctagctctaggaagaataggggtggagtaaggacaaaggattggaccatcgacttgaatagcaaaggatacctgagcatccaacttttctcaagccaaatgctgttgtgggttgatgccactacccctgctgtcacagattagggagagtgtgtgtctaatgaatatgttcctggaacatagtaggtgttcaaaaatatttccagaatgaatgactgatgctacacagcttgagtatccctaactgaagaatctgaaatccaaaatctgaaactttttttttttttttttgagacggagtctcgctctgtccctaggccagagtgcagtggcacgatctcagctcaccgcaacctccgcttcccgggttcaagcgattctcctgcctcagtctcccaagcagctgggactacaggcacgtgctgggatttttttgtatttttagtagagagcgggtttcaccgtgttagccaggatggtctcgatctcctgacctcgtgatcctccctgcctcggcctcccaaagtgctgggattacaggcttgagccaccatgcccggcccaatatctgaaactttttgaaagccaacatgatgcatacaaaatgatcattggatctgttgcctaggctggagtgcagtggcaccatcatagcttagctcactgcagccttggcctcctgggctcaagtgatcctcctgcctcagcctccaaagtagctgggactacaggtgcgtgccaccacacttgactctttgcaacattttggattttagattttcagatttgggatgctcgaccagtataatgcaaatattccaaaatccaaaaacatcagaaatccaaagcacttctggtcacaagcatttcagataagggatactcaacctgtatttatgttatgtgatggtgaagaagagagccgagaaagtgatatcctcaagaaatggccttggggtcacaatagatggtacattaggatacgattcaacatggttaagaaaggttaactaaggttatagggcaaattggaaaatgttttccaaatgtttgtcttaactctgaaaaatgtttggcaaactccccctcccccctaatttggaagtggtttgttttagtcgttttggaagaaataaatatttgcattagaccaaacatttggggcaaacagttctccccatttctgaggctctgtgtgagtaggaggagatgtttcatgccgataacactcatcccttttttggccaaatcgaaggtaactttcgatgtgagcttcacatgcttttcacataactgctagaatgaggttgagcaaatggaaagaaaagaggaagccaagcagcttgatccttccagacctagggatggctgatgacctggcatttgaaggatgtaatcgttaaagaaaaattgcctttctgctcatgggcagggaggctggatccaattaagacaaggaaaacgtatgttaacttggaggaaaaatttctaaacagtcaattctgtaatcctctctgaagaggaagaggccaacatgatgaggctttatggatggtgccaagccctgtgatatataataattagtaaccactggttattttgccgcacacttattctccaaaccactaaccattgcttgggatggaatgcaccaggcctagatatttgccccagatgtcttcccttcagcagtatccaattagagggatttttacaaattaaagcttaattctctataatatatagcaaaatataaattaaggaaggagaaacccgatttccttggttggttccatgggttacggaggtgagggctagtcttcaggtgcacctcttagtttatgcttcagtggctagtggtgactgttctatatcatggtccttggtatttttgctagtctttttggtagcttaaaaacatttcagaggcgaggcatggtggctcatgcctgtaatcccagcactttgggaggccaaggtgggtggatcacctgaggtcaggagtttgagaccaccctggccaacatggcaaaaccccgtctctattaaaaatccaagaattagccaggcatggtggcacgcgcctgtaatctcggctacttgggaggctgagacaggagaatcgcttgaacccgggaggcggaggttgtggtgagctgagatcgcgccactgcactccagcctgggtgacagaggctcaaaaaaaaaaaaaatttgcaaaggtaatactcactaaagaaagtccaggccagaagtggtggctcatgcctgtaatcccagcactttgggaggctgaggctggcagatcacctgaggtcaggagtttgagaagagcctggccaacatggcaaaaccctgtctctactaaaaatacaaaaaaattagcctggtgtgatggcatgcgcctgtagtcccagctactcgggaggctgaagggagagaatggcgtgaacccgggaggcggaggttgcagtgagccgagatcgtgccactgcactccagcctgagggacaaagtaaaactatatctcggaaaaaaaaaaaagtccaaaggaccatgtaaagcatctctctctgtcttcccatgcacccctgctaccaatcccaccactcagaaataattagcgtcagcatgtaggtgaacgttttcccaaatctctgtatatgcacatacgaacatctagatagaactttacacaaaatgggtcccagtgtacacactgttccgcagctgttttcagtccacaatatgctgcagagcctttccatatctgtgtttatagtttcccatgaaatggatgggtgtcaggaaaaattgtgaaagactttggaagctgaatgctgtttcaatggaatgctgggtatgttctagcagactcttaggggttatccagttctaaaggggtctgtgtttttcattgtctttgactagttttataatatatttaaccaagcccctagaatgagccatttaaattctctaatttttaaagataatataaaggaatatcctacccatgatatattcatctttatgcacttattttaaagacttctgtttttttcctgtgggagtatctgcctaataacatcccctttcctctttgggaagaatcataataatttgtgaaataggcttcagtgaccctagggatgtacaatgtagattttcttatgagaaaggagcatgatacatgtgacatgacatttctgagacctttgggacttaacatccctcacctctgagtaatgagtcatcttttctatggtattcaaagtttgaattagggaaattaaggttgagttcagtcaaagactttagttgtagatgacttttcagttgcccttggattttgcatgtgtaaatcaggcagggggtacactcagaaaacaagcccacagcttcgtaaggtgtcttggatctctcactgtggatcatcagcacaaccctgtgggcctgggaattgtttttgctgttgctgttagtattattctagtttgagaaagaaggaaaacaagctcagagaggtgaagtggttttccaagatcacataccaaggagccacttccccttgtttcctgtggtgccaatccattgcttcgtttttcgtgtttgagagcttttgcgtttcattgtacattgtacaattctagggagccattgttcccatcctaaagctggtagatgtgtaaatgtatcaggtcggggggcagaaagtgtcttgaggaagggacgccccttcctaatcccctccaagtgctgcctgtgctggtgtcagtcctcctgaggtcatttgccctgtctttgatctggcacagtatcctcctctgtggaattctgtagctcttcctctggtaactgctttcactaaaggtttgcatggaatttacctagacaagggccctacggttcccacctgagaatagaaaacgcccattaaaaacagcaccacacaaaacaaatcagtggcccctcctcctgctctgcctccctccgagataagcttggcatgagggcatagtccagagccccacggccttcagtaattttgttaacaattggaggagaatggcattttcttctgggaaacatttgcagatgtgtgagctagctctacatggggaagggctgccccttcactgcgtgctgaggctacgggctccgtgtcctgtcagagtgtgggagggagctcctcacactgaagccagctccttccttccgcaaagaagggatctgagggccaaaaggggcccgcatgggtggccgtgcaggagcagaaagaggctccaaagcaggatgggtcccctggcctggattttcctccagggcagctctgcaactctaacacccatccccaggctgtgtgtttcctagggatacgtaataaagtgccaccaactgggtggtttagaacaacagacatctattgtcgcacagttctggaggccagacgtttgaaatcaaggtgtgtgcagggccgtgctccctctgaaggtacccggggaagacccgttccaggcctctctccttggcttgttggtggctgtcttctccctgtgcgtcttcctcttgtgcatctgtccctgtgtccagagttatcctttgtataaggacaccagtgctattggatcatggcccacttgaatgacctcatgttaacttgattacctccataaagatcctatttccaaataaagtcacattctgaggtaccgggggttaggacttcaacataatcttctttggaggacgcagtgaaccctggaacacaggccctgcctgtactgaagcagcagcttttggggatagcctgtatttttaaaacaggaggttctgaggatgaaccaggcgtgggaactgctgctctatagaaccctggagctggtgggttttctgagtgccttctgagattatcttggacatccagactactctgaccgggtccccaaataggactctgcaggttccctggcagttggtttctgtcttctgctcaaatatttctagagacggggagctcataccttcttctaagcagcctatccgattttaaaccactggattaaaaatatctataataatatatatatattatatatatctatatatattagataggcttcttgcctcacccactaaattgtagacttcctgagggctgacaccagggctttttctttgtatcttactggaactaacgagatgctaaaagtaaacccaagtcggcctgtggagacctggtatgtctggtgccatgttaacccattaggtcctggttctgctctttggaggtatccaggataaatgcaccactctttgcctgagggggcccttctaatattagaagacaactatgatacccactgtagaactaaaagcagaaccccaagtccggcacggtggcactcacctgtagtcccagctactcccaagccaggaagatcacttgagccaggagttctgggctgcagtgtgctatgcactgcactccagtgaatagccactgcactccaatctgggcaacagagtgagaccctgtctcttaaaaaacaaacaaacaaacaaacatagccagaaccctgccctccagattcccagactgggctctcattgtgcattgcagccaagtaacagacataaccaaccttaggataggatttattagcaggtgggaatgatgttgttgctaacatctggcaaagctcaaggcttcataacttgccagaagtgagatccagtcacccactatttatttattaatttattatttatttatttatttatttatttatttatttattgagacggagtgttgctctgtcgcccaggctggagtgcaatggcacgatctcggctcactgcaaccttctgcctcccaggttcaagcggttctcttgcctcagcgccccgagtagctgggattacaggcgcccgccaccatgcccggctaacttttgcatttttttttagtagagatggggtttcaccatgttggtcaggctggtctcgaacttctgacctcaggttatccaactgccttggccttacaaagtgctaggattacaggcgtgagccactgcgcccagcctagtcacccactttttaattttcgaggtaatatggtatcttctcctgctgtgcattgaggcaagatgtttccattccattgaaagcttgatcaaggttctatgagaagttcaaagggaaaaggagagtgtgccactcatgtgctgtgtggctcctctccaagcaaaaccatcctcagctgcataaatgtgcagcttggccaggtgatcctggagtctcttctcacccttcaaatcttgagaatttgcaggtgcattttccactgataattcaactgtgggtacttcagaataaaatttgatgttaatttgaagagcaggcattacacattaaaacaaaaattaccccaagggaagaatgagagccaagaggggttacatttgtagtagaaataaacaggaaaaaaacccgccactgctaattgaactgattctcgcaatccaagaaaggcaaatgcatgattctaatgttttctttagtagattacagaaaggaagattaaatcaaaagtcaaaaataaacagtttgattatcctacactgtattatcttaataaactgtcttcctggaaagtttaaaaatacacagtacttcatctggccaaagaaaacagtaagtaaatattgttgagaaaatgtaagaattttccatctagatgtgaggggtggaaatattgccatgtggacttcaagacatcccacaaggagtgagagagtgataggtattacctaccttttaaggcttgttgtcggggacactgttgtcacatacgggggaagaggttgggaggggaatgggccctatcaagcactcttctgggctcctggcaaaacctcacccagttctgcattctcctgcaaggtttgtctagatactagctgtatcctgactggtgatgctcagatttcatagtttagggtgatgtggagaggactgctgattttcttctctctctctcttttttttttttttttttgagatagagtctcgctctgtcacccaggctggagtgcaatggcgcgatcttggctcactgcaacctcctcctcctgggttcaagcaattctcctgtctcagcctcctgagtagctgggactacaggcatgcaccactgtgcccggctaatttttgtatttttttttctttttttttttgagatggagtctcgctctgtcacccaggctggtgtgcagtggcatgatcttggctcactgcaagctccgcctcccgggttcacgccattctcctgcttcagcctcccgtgtagctgggactacaggtgcccgccaccatgccttgctaatttttgtatttttagtagagatggtgtttcaccatgttggccaggatggtctcgatctcccgacctcatgatccacccgcttcagcctcccaaagtgctgggattacaggcatgagccagcacccggctaatttttgtatttttaatagagacgaggtttcatcatattggccagtctgggctcgaactcctgaccttgtgatctgcccgtctcggctccccaaagagctgggattacaggtgtgagccactgtgcctggcatcttcttctttttcttttttttttttttaattttaattttttttttttttttgagatgaagcctaactctgtcacccaggctggagtgcagtggagcaatctcggcccactgcaacctttgcctcccaggttcaagcgtgctgattctcttctgcttaatttttctacagttggaagtagcaaaaggtggagactagtgatgtgagttctgtcctagctttgttgctaacctgccagagaccaaggctggtaactttgtgtctctgtatctttttttttttttttttgagacacagtctcacgcttgcccaggctggagtacagtggtgcgatctcggctcactgcaatctctgcctcctgggttcaagagattcccttgtctctgccacctgagtagctaggattacaggcgcctgctaccatgcccggcttttttttttctttttcttttttttgtatttttagtagagatggggtttcaccatgttggtcaggttggtctcaaactcctgacctcaaatgacccatctgcctcagcctcccaaagtgctgggattacaggtatgaaccactgtacctggcctgtatcttttcttttgagatggtgtcttgctttgttgcccaggctggagtgcagtggcgtgatcttggctcactgccaccttggcctcctgggctcaagtggttttcctgcctccgcctcccaagtagctgggattatatgcgcccgccagcacatctgactaatttttgtatttttagtaaagacgtttcactgtgttggctaggctggtctctaactcccagtctcaggtgatccgccctccttggcctctcaaagtgctaagattacaggtatgagccaccactactggcctgcctctctgtatctttatcatcacataggaataatgccctattgatcacagagaccaaataaaaaatgtaaataagatggggagtccagatgcaaaccctagtatatgtaaaattttagtatataataggctgggcacggtggctcatgcctataatcccagcactttgggaagccgaggtgggtggattgcttgagcccaggagtttgagaccagcctgggcaatatggcgaaactccatctctactaaaaatacaaaaattagccgggcatggtggcgcatgcctgtaaactcagctactagggaggaggttgaggcaagagaatcgcttgaacccgggaggcagagatttgcagtgagctgagatcgtggcactgcactccagcctgggtgacagaacaagacttgatctcaaacaacaacaacagcagcaacaaacaaacaaacatggtagccttgttacagccaggaaggatggagatagtaaatggggaggtagtttctaaggaaaaaagcaagtcctggttagacaggtagtatgtagggatccactacacatgaaaagatgctcgatctcactagaaatctaagatatatagaatcttagtttggcaataatttaaaacattgataaaggcttatttaaaaagtgtgggtgaataggttctttcaaacattacgatcttgttgctgactagagtgtaaattggtaagtctttgtctcaagaacattttggtaatatagacatcaaaagccttaaaattgggtaacccttgaccttgaagttccacgtctaagattttatcttaaggaaaaattagcgtaccaatgacgtgcaggaagttgttcagtagatgatgtttataatagaggttaattggaaacagttccaatgaccatctgtaaaggatcgatataataaatcctggcatattcaaatagtagactcatacatagctattaagaattatggagatccagactgggcagcatggtgaaaccccatctctacaaaaaacaaaaacaaaaaactaaaattagctgggcatggtggtgtgcgcctgaagtcccagctactgtggaggctgaggtgggatgatcacttgagcctgggagttggaggttgcagtgagccacgatggtgccagtatgctccagcctgggtgacaaagtgataccctgtctcaaaaaaaacaaaacaaaacaaaaaaccaacccgcccccccgcaaaaacgttatggagatctagttcgagaccagcctgggcaacatagtgagacccaatctctaaaaaaaaaaaaaaaattaaaaaacatcagcaatcagccaggcatggtggtgcatgcctgtagtcctagctacttgggtgggaggatcatttgagcccaagaattcaaggctgcagtgagctgtgatcatgccattgtgctccagcctggggtgacgagtgagaccatgtctctgagaaaaaaagaaaaaagaattatggagacctattcttattggcatggagagacgatcataacatagtgagcaggggttaggaaaacccagattatgtacaacgaatgtgcgttacacttaataattagaagaaaaaagatgtcttttttggggagggggtgacaatgccttgtaaatgtaaggccacttgagaggactgtacagaaataaaatccttaaagaaaagtaaacatgccaggtcttctgaatctcagcaagggttggccttcttagcattcctccatgggagattctaggattattccagctgtgttacttcaaggattcttgaaactcttcttggacccatttgttgactgactgctttgatggactgtaaatacacatcattaaggctagatgccttaacgcatctagcatactgttttgactccgctagatgatgacatgtctttgtctttcaaatgcgaatttgatttttcggaaaatcaaattttgttaggcttgatgcgtaaagtggccattttggagctggagagtaaggggcaagaatggggaatgagaagactgggacctttcccagtgccctgtgctgggttggggtttataaaaaaccctccaaggcattggctttgttaggctgggctcttctgggtgtgcagcgttgtgtgtttgttttaatagtaaccaccattattttataataaaatgacggttggtggaaggtgagcactcctatccttggttgacaagctgggcagttgatgaagagatactctgtctgtaatcctttaaccagggatgtgcccagtagaggctagattcctgttatctctgtctagtgaactagtgaccaactaatgagcagggaggggtgctttagcatgtgcaaaatccgagtcaattgaactgacatgattcaagacctcctgggtgtgtaatgctggctggggtacttcaggaatgcaaagatgtgagattctgctcttcctcttcaggaccttccagcctagttgggggaaaggcaggtacatgatcaactccattacaaagtaatctaagtacagaggcagccttgatggggggcagggatcagtaaagctttcatcagagaagtggtcttgagctgtgccttgaggacaggtggctggtggtatgaagacagcatttacagggcccctaactggtgcaggctctgtgaaggaggctttatagagatagatgtatttttcaccacggtccaatgcattaggtttcattgtcttttgcacatgacaaatctgacaggctaaggacacattcaggtaggtgttggagcttggctttgagcttccagcctgtgctgtggggagaattccatcttatgaggttacggggtgtgagggacaaaggttgttggcactggggaaagccaaatggtggtgacttgggaacagcttgtggtggccccatttttctggagcctggagtagttgtgggggagcagggagcaggaaggctgcagaagaatagggtcatatggggaggtctctgagtgtcaggctagaatttgggagttaaggttttaggcaaaaaatagccggccaggtacggtagctcacgcctgtaatcctagcactttgggaggccaaagtgggaggattacttgagcccaggagttccagactagcctaggcaatatggtaagacccatatattagtccattttcacactactgataaagacatacctgagactgggtaatttatgcatgaaaaagggtttaatggacttacagttctacgtggctgggaggcctcacaatcatggcagaaggcaaggaagagcaaagtcacgccttaggatggcagcaggcaaagagagagcttgtgcaaggaaactcccccttataataactgtcagatctcatgagacttactcactgtctcaagaacagcaaatacctgtccccatgattcagttacctcccactgggtccctcccacaacatgtgggaattcaagatgaaatttgggtggggacacagccaaaccgtatcaccccatctctacaaaaaataaaaaaattagccaggtgtggtggtgtgcacctgtagtcccagccacttggggaggactgaagcggatcacttgagcccagggatgctgcagtgagctataattacatcactgtactctagcctgggtggcagagtgagaccctatctcaaaaaaaaaaaaaaaaaaaaaaagagccactgagagtttttcagcagaggaggctcaaaaactacctgtacttgaagacaccagatctggcagcagaagctgtagggccaaatgggcagtggttcttggaagtattgtgggggcttccagggttctgcaaaaaagagggagaggggtgggttggagcagctttggggagactaaatctatagcacttggcacctgataggacatggcggtgagtggaaggacaacactgtaacttttgtgcagcaaaagaaacaatcaacagagtgaaaagacaacacacagaattgggggaaacatttgcaaactgttcacctgacaagggattgatacccagaacatacaaggaactcaaacatctcaacaggaaaaaaacattcctattaaaaaatgggcagatgatctggacagacatttctcaaaagaagacatacacaccactaaagaacttactcatgtaaccaaatactgctgtaccccaataacttatagaaaaattaaaaaattaaaaaacatctaaacataaaaaaagaagacatacaaagatggccaataaaaagtgctgaggccgggtgcagtgggtcatgcctgtaatcctagcactttgggaggctgaggcaggtggatcacttgaggtcaggagttcgaaaccagcctgaccaacatggtgaaaccttgtctctactaaaaataaaaaaaattagctgggcgtggtggtggatgcctgtaatcccagctacttgggaggctgagacaggagaatcgcttgaacctgggaggcggaggttgcagtgagccgagatcgtgccaccgcactctagcctgagtgacagagcaagactctgcctcaaaaaaaaaaaaaaaaagaaaaaaaactcaacatcactaatcattaaggaagtgcaaatcaaaaccacaatgaggtattatctcaccgcagttaaaatggccattatcaaaaggacaaaaaataacaaataccggagacgatgtagagaaaagggaactcatacactgttggtgggaatgtaaactagtacagccacgatggagaacagtatggaggttcctccaaaaactacaactagaactaccatatgatccagcaatctcactactgggcatttatccaaaataaaggaaataagtgcatcaaagagacatctgcacccccatgtttattgcagcactattcacaatagccaagatagtggaatcaacttagatatccaacaacagatgaatggataaagaaaatgtggcatatatacacaacgggaatctattcggccctgaagaatgaagtcttgccattcgcagcaacatggatggaactggagggcattatgctaagtgaaataaaccaggcacagaaagttaaatgctatgtgttctcacttatacgtggaagctaaaaaaaagttgattcatagaagtaaaaagtagaacagataatactagaggctgggaagggtagggggaaggggatagagaaaggtttgtttaacaacacaaaattatagctagataggaggaagaaactcctagtgttctatatctgtagaatgactgtagttaacactaatatgtagtttcaaatagctagaaggaggatattgaatgttcctaactgatatggtttggctgtgttcccacccacatctcatcttgaattcccacgtgttgtgggaggggcccgtgggaggtaattgaatcatggggggcaggtcttttccatgctgttctcgtgatagtaagtctcacaagatctgatggttattataaaggggagtttccctgcacaagctctctttgcctgctgccatccatgtaagacgtgacttgctcctacttgtctcccaccatgattatgaggcttccccagccatgtgaaactgaaagtccaatgaaacctctttcttttgtaaattgcccagtcctgggtatgtctttatcagcagtgtgaaaagagactaatacactagcacaaataaatgataaacatttgagatgacagatatgctaattaccctgatctgatcactgtacatcatatgaattgcaacatcaccatgtaccccataaatacgtagttatgtgtcagctaaaagataaaaaactataatatttgcacccaggtgatgctgcagggcagtcaggagatgtggctggctctggggaaaggtgtcagcttggtctgggcctccctcagtggccaaatggccagtgtgaagtcttggagggtgaagggctcctccatgccagaggcaagcacctggcagtagctttgaagaaatgtgggagcagacggtgtctgttgtttttctggcccacatctaccccctcttcttctggcaacagcacctccatttttcttgggggaccactcctccctgtatttaatccacaaggttgggtggagatgatgtctcattggttccatcagtgagcacatgactcagccctggctgtgcagagccttgattctctgcttggcctcagggatggggatgggattcttggttccaaaagggctgctcttctgctgctggggttgccaagctggtggagggaaacttggagctcttggtggccgttgccacagcctatctgagaataaaggcggcatagcacgatgttgaatcaaaggctgatggggtgggggagagagagagagtcctcattgcattgtttcattttggtgtccagccattctgggggccagatgtacccccctggtttcctgtttgggtgaacgtgtgacttgccacttacagtcaaaggatcctgactcattcagggttaaaagtcacatccttaggggatacctgccttaaagaacccaagacagcaggccagagacatggggcctgggtcaggaggagccagccccctgagtcaaggaaggctggatgtgcacctttgtcccaggctttgcttgagcagagggccaggtgtatttgatatttgccacaaagaatacaatccttaacctggctgcccttgtgagactccaactgtagcaaagaaagattaggaaacaaacatcccagtcaccatggaaatgtgaacccaaggtgttaggaacaatagctgtgtgagtccggaagtggattctgtccacacacatgttggtttgatcccccatctatttccttgtgggggcctgggcatatctgtgaacgtatgatatagccagctgctctagggctgggtgccacctcccattagccttggtttcatcatcaccaaaatagctgtaaacctaatacactgcttatgcatgtcagaacctccttacagcctccctcggaggtaaatattatttttatcttaattccacagatgagaaaacagaagctcagggaggttcctaaactttcccaaggtcacagttgttgatggaagagccagggtttgaacccagcccgttgagtctgtgcttttttaaccaccacgttcctcacgttggtgttgacaaaaaatattactaaaagtagttcattcttactctacatgtcttatttcaattctgccacaaacctatgaggcaagtacaactggttaattccatcttataaacgaggaagctgaggcacagaagacttaggaatcttgcccaagttccaccgtcagtaggaggcaaaagtacatttgggggttacttttttcaggtggatttgaaatgataatgtgtcttaaatttaatttggaagccaagaatgggtgataactgtaattttttcttttcttttctccttcccctcccctccttttcttttctattcttttcttttctccctccccttttttcttttcttttctttcttcttttcttttcttattattttttgagacagagtcttgctctgtcacccaggctggagtgcagtggcacgatctcggctcactgcaacctctgcctcctgggttcaagtgattgtcctgcctcagcctcccgaatacctgggattataggtgcacgccttgtatttttagtagagacagcatttcaccatgttagccaggctggtctcgaactcctgacctcaggtgatcagcctgcctcggcctcccaaagtgctgagattacagacatgagctaccacgcccggcctaattaattaatttttttgagatggagtctcactctgttgcccaggctggagtgcagtgacaccatctcagctcactgcaacctctgccttcccaggcttgggtgatcctcccacctcagccttctgagtagctgggactagaggtgcacaccaccaggactggctaatttttttttattttttttatttttgtagagacggtttcaccatgttgcccaggctgggataagtgtaatttctaaatctggctttcatcagtggtgatgttcttcatgtgtagatttatactagggaaacaaatcaggagggggaacaaggtggacagagaataatagcaacttgatttgcctattatccctggaaaaccatatcctggaactcactagcatgtaagtaattggaaaatgttaaagcaaaagagccaggtttagaaacaaaatcacaccatcaagtctatgtaaatgagttcctcggtgaagagaaaagcaaatgcactgctgtttgtgggctggctggctgtgtcccaagtgctgcagagtgggagtctgggaccagttgttttttcattgagggccccttacaaggcacactcgggttgttcagactccatgaagctcatgaattggctcaataacaaaaagcatgaatcatttgaacgtgaaggtacagggacatctgtttgagtaatttctgacagtttttttttcctttttgaaaatgtgttatatttaggatttacttgagaaataaggtggacttggggactgacagcccatcagtttcatgggaacagggcctgtgtctttttattgctctttttgtgtatgtctgtagacaataggtgctcaataagtactttgtgtaaatggtgactttaggagcacctggattctgccccaggagattcctgaggggctggcaggtaaccaaaggctaatggaggtttacagccaagttccagatggttcaggggcccgaacccctgggtggagcctctcttgggccatatacccattcccatgcctggctgtcccccatcccttagaccgtggctgctgctgctggactgtgttctcttgtgcagatattaacggtgccaaatagtgccagggcccaggttgcagtgggctccttattgtcctgtaatctcagcactttgggaggccgaggcaggctgatcacctgaggtcaggagttcttattgtctagcccagaggttgcaaactgacctacacactattttttttttcttttttttgagacggagtctcgctgtctctcccaggctggagtgcagtggcgcgatctcggctcactgcaagctccgcctcccgggttcacgccattctcctgcctcagcctcccgagtagctgggactacaggcgcccgcacctcacctggctaattttttgtgtttttagtagagatggggtttcactgtgttagccaggatggtctcgatctcccgatctcgtgatccgcccgccttggcctcccaaagtgctgggattacaggcgtgagccactgcgcctggcccctacacactattttaaaaatcgggaaatttcacgtaacctttctgatttaagacttcttttagataattcaaagttttggcgacattaggtaagaatttttgtgtagcagcatttgtctgcagttaatttttttcttttttttgagacggagtcttgctctgttgctcaggctggagtacagtggcatgatcttggcttactgcaacctctgcctcccaggttcaagcaattctcctgcctcagcctcacaagtagctgggcacacgccactgcacctgactaatttttgtatttttagtagagctggggttttgccatgttatccaggctggtctcgaactcctgacctcaggtgatccacccactttggcctcccaaagtgcagttaaatattgattgtctcttttgtggcaagattccagtctcttccttttaccacaggccacaatagttcctcttgtctcatatcaagtcccctttactcatttatatcacctgaccagcctctggtttcagggcctgtcttctgtagtgtatttgccttaccttttttttttttttttttgagacggagtctcactctgtcactcaggttggaatgcagccgcgcgatcttggcttactgcaatctccgactcccaggttcaagtgattctcgtgtctcagccacttgagtagctgggattacaggcatgtgccaccattcccagctaagttttgtatttttagtagaaatggggtttcatcatgttggccaggctggtctcgaactcctgcactcaagtgatttgcccccgttggcctcccagagtgctgggattacaggcgtaagccatcttgcctggcctgtatttgccttacaaactgcaagtgatctaaaaagaacaaattctcatttgaaaaaataagcactatggccagcacaggactgacttaaaacataatttcaataggcactgattttgtcatttaatgctgagaagaggcaaaaaccctatatggattcttagaaataggactatgttggaatggaagagatggcaggcattgatttggagtctccagcatactaaagggaagggctttcttcaaggaaatgaaaagtgataaagaaagctacttgatagaagtattcaggggcttgaaggcctttcaacttcagggagccggagagggggagggaactgaggagggcaggtcgggtggggtggggaagagagagagacccttccatctcagccttccccactccccatgggaacactggaaaatagaaaggacaaaggaaatggaagcaagtgcgctgggaaatgcccaagtttcagcttgaatgatgctgtttacatgttcttacaggaaagactattatgggccagctgttaatgggttgtctgtctgtcaagagagagagggatggaggaaggggctggagttgagggatggaggaaggggctggagttaaggcatggaaagggctctaagccttgcttcttgcatttcctgtctttaaacttacgaactaaagggcttgagggtgagggggtgctgatctagggaggaaggaggttgctttctgtgtgcgtgtttttctgtttcatgtcctgactatttcctgggtccagagagggttttctggtctgaagaggagagtgtgcccctcacagtagatggggtgacagacagttctgccctctgctgtgctggtgacagccgggagggtcagactttatcagtttcctgggtggagggtggacgggaagcggggggccttctgctgaagatctcaattaaactttggactggctcatccagggaggtggcgcgatttcctctggaggtttaaaataaatagcaggtacttgatttcatctggaatggagggtgtggccctgcctggcactgggatggacccaatggtctccccagccttctttgttctgatactacacaccccacccctcaaccgcctgagaaatttctggaactgcgtttagtctcagtacattaggattattgctagaaataaagcatccctggatcctttggcttcttggacaatatgcaggaaaacacccgccttctcttagacatgtagggttcgcgccgttgacctgagcttcagtgccagagagtcgagcaaagagaatatcacttttacttaaaagtgaactgcacgggggttgactctttcaaggcctgagattgatgcactctaatttgccatctggaattggttagccacattcttctgggctctgatgagaaatgatgaccccggagaagggtggtcatatggccagtgtcaggattaatagaatcccctttcattcttgaaagggtccctgtttgggcaataaagttgatggttactctaccatgaaagagcagaaaaagctgagcagaaaactttgttttggaaaagggggtgttgaagccaaggcattagagaaacgtgatttttcatttaattatatatatagttttcttttttgtaatctaaatgacatgtgcaaccttcagagcctgactccttgctggaaagagagaaaggaggttttgttactgagaagcttattttaaaagtcaagtcgggtataataaaataaatgaaataaataaaagagctccccagttaagggcctttcccatgctggggcttcgggataacaagagcttgaactgccttctgtcacatggggcaggtccttaaggagcagaaggttttttttttttttttgagacacagtctcactctgtcacccaggctggagtacagtggtgcaatctcagctcactgcaacctccgcctcccggtttcaagcgattttcctgcttcagcctcccaagtagctgggactacaggcacctgccaccgtacttgactaaattttttgtatttttagtagagatggggttttgccgtgttgccaggctggtctcaaactcctgacctcaggtgatccgtctgcctcagcctcccaaagtcctgggattacaggcatgagccactgcactaggcctggtttattattatattttaagttctgggatacatgtgcagaacgtgcaggtttgttacataggtatacatgtgctatggtggcttgctgcatccatcaacccatcacctacgtttggtttttctcctaatgctatccctcccctagccccccaccccctaataagccccggtgtgtgatgttcccctccctttgtccatgtgttgttattgttcagctctcacttatgaatgtttggttttatgttcctgtgttagtttgctgagaatgatggtttccagcttcattcatgtccctgcaaaggatgtgaactcatccttttttatggctgcatagtattccatggtgtatatgtgccatgttttctttatccagtctgtcattgatgggcatttgggttggttccaagtctttgctattgtgaacagtgctgcaataaacatacgtgtgcgtgtgtctttatagtagaataatttataatcctttgggtatatacccagtaatgggactgctgggtcaaatggtatttctggctctagatccttgaggaatcaccacattgtcttccacaatggtagaactaatttacattcccaccaacagtgtaaaagcattcctatttctccacatcctctccagcatctgtttcccgactttttttttttttttttttttttttttttgagacggagtctcactctgtcactcaggctggagtgcagtggcaggatctccgctcactgcaagctctttcctctgggttcatgccattctcctgcctcagcctcctgagtagctgggactacaggcgcctgctaccatgcccggctaatttttttgtatttttagtagagacggggtttcaccatgttagccaggatggtctcgacctcctgacatcatgatctgcccgcctcagcctcccaaagtgctgggattacaggcatgagccaccacgcccggccttcccaactttttaatgatcaccattctaactggcatgagatggcatctattgtgtttttgatttgcatttctctaatgaccagtgatgatgagcttttttttaatatgtttgttggccacataaatgtcttcttttgagaagtatctgttcatatcctttgcccgctttttgatggggttgtttttttcttgtaaatttaagttctttgtagattctggacattagccctttgtcagatggatagattgcaattttttttttaagtgacgtggtctcaccacgtatcccagtctagacttgaactcctgagctcaagcaatcttcctgcctcagcctccctagcttccaagtagctaggattacaggctcaagccactgtgcccagccaggagcagttttgaaaggcaaaaggaccatgactgaatgctgcatatctagaacatccaggaatgcagatgcccaggccaaagggctctggggtcggagcaggcaggattgtgccgggggctctcaaccctttgctgggggccacttgttctctccttaaccgtggactattgcaaagggtggagatcggagactggaaaaaaatccgtgttctagtcccttgttgcgtgcttcctggtggactgacctgtagcagatagccctcctcctccggcctcagcttcctcgtctgtgacgtgggcagggtgccgtcatctatccccggggcttctgtgagaatcaaatggagaagagcaaaggccacgtgaggggttggctctgtggtccctgtgctcatagactgcggtttcctacgggcaaaaggggaaagtgaccctagaacacctttgtgtcagggatgcatgccagatggcctttagtgcactctcttcccagccctgtcagcaactgacaggttcaataagactttgccaaaatgttcaactagcttttcctgatgcgggtctttcttcaaattctgtcccacaccgttaactgcaaacttctttcagaacacctttcacgaaaatgaagctggcatagctgtggaaagagttgatggtagtgttgtatataattgtgaaaattggcatagtggtgggcacataggggatgttcattcattcacccagtgagcctttcactgtgcccaggccctgagacagtcggggtggctgggaacatggtctttgccttgattgtggaattgcctgcttgagggaatggcctgcaaatcacacaggtggagaggaggaagagccgttttcctccgccctcttaggttcattggttgggggttacaaatgaagttgacaaaagattaacaagagaaaaaatggatttaattggattcttaggcactggagttcatagggaaatgtggctcaaggaggcagctaggatttggggcttatataccatcttaggctaaaaaagaaaaggagttttgggcttctggagggtagggaagccatgggaaggtaaggggaggaaatgtatggtaaataagggttgtttagtaggtaagagttgtctcaggtgctaagagttgtctgcttttcttcctgctgtgggggaggagggagacatctttacaagtagaaatttatgccctgcttttaggcagaagaagggcagagagctaattgccttcagctgaaaacaattcttatgccaaagtggtatattttcgggtggcatattttggtcccctttattaataacttacaccctattaaagaagaataacgactgagtgaccagagattgaatgctgagtggaaaagttttactgccaggtggggagcccgatctagcttagtctcagctctgagggatggaatcggagcgggggcaggaatgatgtaggtttttcatagctgaaagcccacaagctgtgctgcattgacgtcaggaaggcagtcttgccgagcactggtgcctgcctggccacacctgagcttgtcagtgagctgggtacctgactggctgacagtgctctcctgcatccaagagctgccctggcatcatggtgcccagtgtgtctgctgcacacgagatacaccaaagcaggtgatatggttagggctttgtgtccccacccaaatctcatcttgaattgtaacccccataatctccacgtatcaagggagggacaagttggaggaaattgaatcatggggatggtttccaccttgctgttcttgtgaactatcttgtgatagtgagtgagttctcatgagatctgatggttttatgaggggctctttccccttggcttggcacttctccttcctgccaccttgtgaagaaggtgtcttgcttcccctttgccttccgccatgattgtaagtttcctgagctccccccgcccccagccatgctgaactgtgagtcaattaaacccccttcctttataaattacccagtctcgggcagttcttatagcaatgtgaaaacagactaataggccaggcgcagtggctcacgcctataatcccagcactttgggagggtgaggtaggcggatcacctaaggtcaggagttcaagaccagcctggccaccatgatgaaaccctgtctctactaaaaatacaaaaattagctggacatggaggtgtgcctgtaatcccaactactcaggaggctgagacaggagaattgcttgaacctgggaggtggaagttgcagtgagctgagatcacaccactgcattcccacctgggtgaaagagcaagactccatctcagaaaatggactgatacagcaggattgtggcacccagggaggtgtgctctgtgtcggcatgttaggtggccaggtcgagtttgtcccatctgatgggttatgtacctattaaaataatatagaatcatgaaaaataatatataaactcataaatgcaagaagtagaacattacaaaatcccaactatagtgcttagaaaccctttgacagcaactgatagcaactcaaatataattagtgtatacaaaaaagagaatttatggattcatatgtctgggagtattcctggatttctggatccaaggattcaaacaatgttcccagtttttctttttttttttttttttctttctgtccctatctctcagcttgcttgtctttcctctgcttaattcttggctgggtcagggggtcaaagaacagcttgcttaacaaccccaaggcaaatagagcttcttttctgaaaaccagcaggaaagtcacggaaaggactctcttgggaaggatggtgggggtcatgtggaatgacttactgaagaaggggatgaaggagtgccacacagtgaaaaccacaactgtgtgagcacgaggcacccctgataggacctagtggttcatcagtcacttctctgcctgagtggtaggagcctagattttatagttgttttcaatgacaaaaatcatagtttataaaagagcataatctgacccagaggtgtcctttctgtcacgttatgattggggacaaagtagacatgctcttcagcttgatcatatagtagctaccagggtttagtacactgtctctataaagggcagatgataagtagttaaggcttatgagccatatggcttctgttgcaggcactcagctctgccattgtagtttgaaagcagccacaggctatacctaaagaaatgggcatgacagtgtgccaataaaactttatttacaagaacaggtgttgggccagatttggcccacaggccttatcttgccatccccttgatataaacatgactgaaaaatttatattctaatagaccataagacactgctctaaagtaaattgtatatttttaaatcatgtgtctgataaggagttaagatgcaaaatatataaggaactcctactattcaataacaacaacaacagcaacaaaaaacctgattaaaaaatgagcaaaggaattgaacagacatttctccaaagaaggtatacaaatgactataagtatatgaaaagatgctcaatatcactagtcattagaaaaatgcaaatcaaaacctcaatgtgttgcctgggcaacaaagtgagacccccatctctacagaaaaaacaaaaaattagccgggcatggtggcttgggcctatagtcctagctacacaggaggctgaggtgggaggatcatttggacccaggaggtcgaagctgcagtgagctgtgattgcaatactgcactccagcctgagcaacagagttgagaccctgtctcaacaaaacaaaacaaaaacccaaaaaaccacaatgagctgtcacctcatacctgttaggacagatattataataaaaacaaaaaataacttgttgatgaagatgtggagaaatgggaacagttgtgcactgttggtggggatataaaatagcatagtcagctactatggaaaatagtatggaggttcctcaaaaaattaaaagtaggattaccacatggtccagcaatctcacttctgggtttttatccaaaagaattcaaggctgggcgcggtggctcgcacctgtaatcccagcactttgggaggccgaggtgggtggatcacgaggtcagaagatcaagaccatcctggccaacatggtgaaatcccgtctctactaaaaatacaaaaaaattagctgggcgtggttgcgtgtgcctgtagtcccaggtactctggagactgaggcagaagaatctcttgaacccagtaggcggaggttgcagtgagccaagatcgcactactgcactgcagcctggcgacagagcaagactctttcttaaaaaaaaaaagaattcaaatcgggatctcaaagagatatttgcactcccttgttcattgcagcattattcataatagccgagaggtggaaacaacctcaaagtctataggtaaatgaatgaaatgaaaaaactgtggcgtgttcgtgcaatggaatactatccagccttattaaaaaggaaatcctgccatagccacaacatgtatgaacttgtaggacattatcgtaagtaaaataagctagtcacagaagaacaaataatgcacaattccattcatatgagaaatttatagtagtcaaactcataagagaatggtggttgccaggggagagggaaatggagaattgttgctcagtgggtataaagtttctgatatacaagatgagaaagtttgagaggtctgctgtataacattgtgcttatagttaatcatactgtgcacttaaaaatttgttaaggccgggcgcggtggctcacgcctgtaatcccagcactttgggaggccgaggcgggcggatcacgaggtcaggagattgagaccatcctggctaacatgatgaaaccccgtctctactaaaaaaatacaaaaaagttagctgggcatggtggcgggtgcctgtagtcccagctactcgggaggctgaggcaggagaatggcgtgaacccgggaggcagagcctgcagtgagccgagatcatgctactgccctccagcctgggtgacagagcgagactccatctcaaaaaaaaaaaaaaaaaaaaaaaaaagaaaaaaagataaatttgttaagagaacagatctcatgttgtgttttttaaaatcacaataaaaatatacagttatcccttagtatcctttggtcattggttccaggtccccccttatatactaaatccatggatgctcaagtccctgatataaagtgacatagtattcacatataacttatgcacatcatcatccaaactctaatctctggattacttataatacctcatacaatgtaaatgctgtgtaatagttgttatactgtgttgttcagggaataatgacaagaaaaaagtctatatgtgttcagtacagacggctttttttttccccctcaagagttttcagttggagggtggttgaatccatggatgtggaacctgtggatagggagggctgactgtatgtgtataccaaatcatgtaaattttataatagtttattttttgttcctgatgtaatgggaagcatttggaaaacataaaattgatcccatcacaaaagaggaattaagattgccttgggttaagggttaagtaatgtcctatcaccagttaatctgccaaggatgttggtcatggccacattcaagaagtggtgtctggaggccacaatgagatggcccagttcagacatcggctagaattgtgtggcagagcgtacaattatgtcacgaatttgggattagcatggcatacctagttgaggtttaaagctccctcctgcaccttccaaagcaggtgttgcttggggttgaaaaccttcactgtttggtcaacagaaggccctcacagctctgatgggaatgtcacctgagaagggctggtctcctcgtggatttgcatttccgcaccttcagacactgcctcagccagctgctgttttaactggcacagagggcctcgctgagagcctcttgggttctatccagatctgagaaggaatctgggatgccggggtcagatccgtgccctggcccgaggatgggattttgtaccccgttgctttctgcagttgtgatgaggtggtgcttggcaatggcctggagctcggcatctgagtgactgtccgtcctagggcgtccaactccagacctctcttacccaggccagcggagggcggaaactctgagaacattccattagaataagatacgtttaataagagcaatggaaaatggtaaacctgacttggggaaagggaatgtgctctttcatgtaaaacaaacaaacaaaaaatgtgactgtgagaagcatccagaaaaatacgatgacctggaggctggatttaaaattggcactgagggaaatctcatttccacagtcgatgactcccccttcagctatgttcatgccagtggagcaaaccaaaataactttataaattaaagtttatgtagtcaggaaagctatgcctggactatcacacaccagatgaaacccttgaaggctttgtttacaaccgacatcctggggttggaggttaatagtgtctggagaaggttaggtcatgcacatgtttaatagcaattaaaacaaaatcactggtgatggtcaaagagacacagctatgtttatttactatagtttatgccacctttgtttgtttgtttgttttgccctctggaaaaaatgtctttgtcctgccataattaattgtaaccagcttttgtttagagggggccacatggaaactgctcagagagctcaaagtgtgttggcaagtggtgacttgtaactagtacctcaatcattttcttttatgatacacataatagaaggatgcatttgggatgtaaaagtttcaaattataggggcacatatatatacagacaatcatgaaagtcccccccaccctgcctggctgctgacatttggtgataatctttccagacatctttctaaatgctgactgtttatatgtgagtgaacaagtgtttatatccatatgcacacaaatacgtaattagctttatttttattttaatttcttttgagacagggtctcaggctggagtgcactggtgtgatcatagctcactgcagcctcaacctcctggactctagcaatcctcccaccttggcctctgaaggagctgggactataggcatgtaccaccacacccagccaatttttaaatttttgtgtggagaaagggtcttgccatgttgcccaggctggtctcaaactcctgggctcaagcaatcctcctgcctctgcctcccaaagtgctaggattatagaagtgagccactatcgctggctgttgtcgttatttttgatccataaaaagagggtcatgatgtgtgtgttgatgtacagcttgcttttttcacttacacatccagagttccttcacactggcccatgtgcagatgacatttttttaatcctgcagggcgttccataatatgaattctgttcctaatttattgagccatttcctcaccctttctttttgatactaaatgaagcaatgatagcatgagattatgaatgtgccttgtggagcttagactgcctggctttgaaacaggacttagactagatgagtgacctagggcagggggtggcaagctatagcctccatggcaaatccaccccgctgtgtttctgtagggcctgtgaggcaagactgattttttcatttttaaatggttaaaaaaaaaaggtaagtatttcctaatatatgaaaacggtgtgaaattcaaaattcagtgtccattaacttgttttgttgaacagcatgctcatttgtggatctattatctagggcttttttcatgccacagaattgagtagttgtgacagagaccatatggcccacctagaatatttaccatctggccttttacagaaaacatttgccgacctctgacctagggcaagttactaatctctccatgtctcaactttcttttctttaaaatggagatactagctgggcgcggtggctcatgcctgtaatcccagcattttgggaggctgaggtgggtggatcacctgaggtcagaagttcaagaccagcctggtcaacatggtgaaaccccgtctttactaaatatacaaaaaaattagccgggcatggtggcgggtgcctgtaatcccagctactcaggaggctgagacaggagaataacttgaacccaggaagcggaggttgcagtgagccgagatcgtgccattgtgctccagcctgggcaacaagagcgaaacttcgtctcaaaaaacaaaaaacgaaaaacaaaaaggagatactaataatacctaccttgtagggtgaagtgacttaatatatatatcaaataaatatcatatgtagaatacctactttgtaggcttatctaagttacttagtacatatatcaaataaatattatgtgacacaccaggtatatcatgtatcaaatatgtatgaattgtgtgtaaacactttaaacattttattttattttattttacttatttgagatggagtctcactctgttgcccaggctggagtgcaatggcgcgatctcggctcactgcaatctccatctcccaggttcaagcaattctcttgtctcagcctcctaagtagctgggactacaggtgcgctccaccatgcccatctaattttttaaatatttttagtagagatggggtttcatcatgttggccaggctggtcttgaactcctgacctcaggtgatctgcctacctcggcctcccaaaatgctgggattataggcgtgagccactgcgtccagctgactttgaactttttaaatgctcaaaaaagtttactattactgtgtcattgttattgtaagtgcataactctttgtgcacgtgtgcaaggatgtcacagatacctggcagtgggcttaaagatgaagggtcttaacaaattgccttccagaatggccccactaagtcatgctcccaacagtggagtctctgctttcccgcattcttggcaactctggatagggactagggcttagaaaagaacactgaatcctcaaagagcctctgacctccacagaggctcttcagagtctaggagtgctgtgcccagacctgtggggtgaatctccctggaaagccttcagtcagaacatgctcattgtttgttgagtgagagtctcttctgtgttaagcctttgacctgtaaattttcattttacagatgaagaaactgaggggctcagagaaattaaatcacctgctccaggtcctgaagctacttgtggatgtagggtttgaactcagttgtgggggccttcatacaactttctttgccattctccctaattccaggaaggataaggcaacgtcagagatagtcattttctttaactttttctttttcttttatttgaggcagggtctcgctctgtcacccaggctggagtgcagtggcgtcatcacaacctattacaaccttgatctcccaggctccaggcatcctacagcctcatttaaattttttttttttttttgtacagtcaaggtctcactttgttgcccaggtcttgaactcctggactcaaatgatcctactgcctcggcctcccaaagtgctgggattacaggcatgagccactgtgcctggccctacaccacatattccatccacactttttccttaagtcagcaccttgatgactggatcagagctacacacaaaattggaagtgaacgttggagaaagtggcttagtcatgacctgtgtttatctcctcttgctctgagtaaagaggatgtgtaatagagtatgttactatatttttcatatcccgatgccatagcctgtgctgcccagtcacactgagaacaatgcagttctcatagataacccgttgttgggtgatatgtctatttctaggcatctccacgctctcctatcgagggcctttgcaacagtatttcccatgttccatcagcgcgtctgcaaaacatgaagcagcttcattcacccagagactcctgaccttgtgcatgaggggaaaatgtttctggttttgtgtgtgttttcaatgacgaacatttgcattctttcctcccctcactttttttttttctcacgttgacattaagaaacaacaacaaaacgctgcttgctcccaaactgtttgaatttaaaactctgaatcttaatttgcatagacagtagttctttacaaggaatgtgaaccatttgacagaatttcctgaaggaacaaagagccatgatttcctgattaaaaccatgttaaaacaaaaagcagactataaccaaaaggctctgtaagagtatttcttgttcaatcagatttcaaaggcagcacaagctggatgtttatggcatcaccaatgcctttctgtgatgcctgagcttttcaagaacatactcagaactttgtcttaagcctgtctttactcggagctgtctcccgaagccttggccttcctctccgcagcttcagttactgagtcactggaacagaggaagaagcccaggcttccattctgacaggctgcgaacatttatctggagttgtaattgtcatactcccacgttattttcttgctgtcttctaaagcgatgatgaaagatgtctgggggaaagaaaataaaacaaaaaaccttctagcatctacacacctaaagcagggtttgtcaaccttgacaccgttgccatctggggctggataattctttgtcatgggggccggcctgtgcgttggatgatgtttaacagcatctgtggcctttagcttcatagttatgacaaccaaaaatgtctccagactttgtcaaatgtcctcttgggggtaaaattgctcctggttgagaaccactcgcctcgattttggtggtctagaatttgcaagctgcttctccgccctgtgcatatccaatcctcagcccttccactaaggattagaacttgattttcttcttttcatcccaccctccctgccttgagatattgctgcatctggacagatgtgccaagtacaattctggctcaggtgactgaagtctaagtcagacatatgtcttcactctccctgaccatccctcttgctgctggcctgcgtggcgtgctcgtgccgataggggcagctgtgtgagtagcaggaccatcctggagacagccatgcaaagggaaaccatctgggtggggtgagcttgccagccccagctacaggtcctggtggagttgacagttgatggatcactgtgctgtgacctctgggcagcccaggcctgcgacgggcagagagctgtcttgtttctccttttggaacctgaagggcagagacagggtgaagttgccaggagaggctttcagctggatcctaggggccagcgtgcagccctttcccagggctgggggtaggggagaagtgtctctctctgggccgtgtggatgggccagaaccctgagctgggtgcagagggctacgctggagaggcggggaagggcactggaccgggtgtctcgagacctgggcatggttttagttctaccccgggtagcagcacgatcttgtgcaaatagtgtcttccttctggtcctcatgtttctcgtaaagctgacttccaactagaacagtctacctttctatttttctcctgatttgtagaaaaagatggtgctgttaagagacggaaatgtggccttcctaaatttgctttgagtcctgagttcctgatttgggggcaagtgtctgtgaagggcttggggtcactctgtggcttttgcctcatttttatgggtcgtagaggatacctcaataaatagcatttttcttccctgaacaaattgagagatgaggccatggttgaaactttgaactttggaacttgcccagatgtatcaggtcagtcaccctcctcccctggggccaataaaccaagtgttccaaaggccaggtggtcttagggaaaatgatggaccctgaagggtgagggtcatggccagtgtggactacagaggatcccctagccacactggagaggggacagtgccctggttttcctgatacgcccccttagtgctcaaggctggtttcaaccctgctgtactaatctgctgatgagggagagttggtggctcagtggtgacagcacaggtttgacagagggtgtctacaccacccagtgcccccttgagctcacatctgagggtctgttgagattacagaggcccttgatagagtccgaaatttgaaggacaagcaaggaagattggagcatctgtgaactatctccagttcagcattgcattagaaaaggaattacatcaggtcactgatgtcttctcctaactcagtgatctccacagccccctggatcctgccaggcctgtggagaagagggacaagccagcctccccaccacccctgccctccgttccttttatatttaaatcagaagcttaggctcctccgtgtagctgctctatttttcatgcctcttgcctgggtctaagccctggagcttagggtgctgtgatatgcttgcgggatgctgccccaccacggctggaaccagggcttcagcccggcgcacacccagctcgtttggaggtcacggctcaccataaaaatggtgtgagtggccagctcttttttcactgtggctctgggcagcccagcccagctccggggtggatgcaaggcctgagagtgaactttgttgtgaatgatgacacaattccagaaaaatgcagtgtctcccagatacggcttctggagctttgcctggggtggggggctggaggttgtttagtgtttgggttcctggtggttctttgccccaggggtgtgtgtgtgtgtgtgtgtgtgtgtacacatgtgtgtgcgtgcatgctttttcatgaggcacacttattttcagatgttcacatggactctttttgagattccccaggggaaaaggagaaagtacagaaagccgtgacacctgatggaaaatattacgctttagtcaacagggctgatgtgtctcctctgactttgcctttaaaccaaaccacaccacagcggggaaagatgagccacacatgaggcctgctgggccggtgactgtcccctaaagtgggactcttgtaattctaagcgcctttgaaaaatgctttcagaatcatccagtacttgagttgtagggggcctgaaaggtcatcttggcccagtggcttgttttaaaggaggaggaaactgagggccagagaggacctatgaccctcccagggttgcacagctagaactcaaatcctgtctcttgatcctcagagaagggtttggtctgttctgttctgccctactttagtttttagacagtgtattgtgataagttttagatttttttttttgtactctgctcttattcattcaacaactctggggatttactggggaacaggcagacctggtccttgtgctcagggggcttacagcctaatgggaaaggcagcttggaacaagaaaccgtgcatgggatttgtagcgggtgtggctatcttatttctggccagtatggggagggagaaggggtgggagttgatggctggggcacggaggatgtcatttcagctctgtggcctgggtcaggtgcccagcccagcaatctgagtgtggatgactctggactatttctccaggaggaggtgggattcacaggcagagacatatcaaaacagggaccttgggatgtatgatgtattttgtaagaaaaaaatggaaaaacaggccgggcacggtggctcacgcctgtaatctcagcactttgggaggctgagacggatggatcacctgaggtcaggagttcgagaccagcctggccaatgtggtgaaaccccatctctactaaaaatgcaaaagttagctgggcatgttggcaggtgcctgtaatcccagctactcaggaggcttaagcaggagaattgctttaacccaggaagccgagattgcgccattgcactccagcctgggcgacagagcaagactcagtctcaaaaaaaaaaaaaaaaaaagaaggaaaaacagagtagagcaggaagctctgtgtatgtatgcgcaggtaaggtcgtcaggtgggaggaggccaggagatgagccatttggaagcccggaggtggccttgacttccctgatgggaggagagagagctgctgggagagataggatccagggaggggtgtggcacaggcttctggagggacagcagctatggccagaggtggatctcttattctcaggggtatcagggacccaggctctttccacttggaacacaagatagcaggggcctttgtcaccagcaggatggaagctgacacacaggacaccccttccaggaagctttgtcacatcgacttcacctaactccaatgacctctcccttctgagtccctctgcacttagaggctctttctgtttggactgagtggtggttttggaaaggctcttgtgtgattttcactggcgtggactcttccccagatgctcactttgtactaacaccgctggctcattatcacagagtcatggagcaggcactgagactcagagagctctgtggctgcgcaaggtcagggtaaaggtgggacttcagcctcaccagactccagagcctctggccgttcccgccatgcctgctgccccctgtcctggtgtgttttctgcccattctcccagacacgggctccttgagggacaaggtggtgagttagccctcttgcttcgagccatcatttatcatggattgtgctagcagtcgtaggtacacagacgagcaaggcctggctttgccctcgagagctgaccgggttgtagaagctgggatgcagggagggctctgggcccagggaacaaccacttgaggcagccagggaaggcttcttggaggaatgacacaggagctggcttgggctatatagtctctcactttgctgaacttccatttcctagtaagtaacttggatatgactgtgaagttattgcaaccattgtgtaaaatagttattcaagcaaaccagtttgaaaccctttgcaaatagaagacaccgagacttggtattgacagtcctctgtcaggagaggatcccagtcttggcccagcctccactgcacactgtcccaggaaagcctcccagagccaccctctcgctgcctgcagggctgcccttcagtggcctcgactcctgtggagactctgcattcccggccagatttgcctttccctctgggcggacccccccacacacctcacagcaccagcctgggagcttgggagggggcgtgaaaccagcaggtgggagtctggagtcctggctccggtagtcgccagccacttcttgtcccctggtccctcatcctccatcctctaggcctactcttctctttgcagaaaggctccttggggttcagagaatgtaggaaacttgttggagctcacacagctgagtaacaaccaggccctgctgcctcctgtacacagtatttcctgctgctctctgggtacatggagtgggaaggggaggccctgggccacagcaccccacccctcacctctatcgcaccccacccttcacccctattgcaccccacccctcacccgtcgcctctttattctatctctgaggtcgtgactgtgtctctggtaatgaatattttgctttggaacatcccccctctttttattgagagataattcacgtaccataatattctccactttaaagtgtaaatttaatagtctttgtacattcacaatgttgtgcaaccatcaccactatctaattccaaaacactttcatcaccatcaccccaaaaagaaaccctggatctaatagcgatcacttcccacttgcccctaccacggtccctggcaaccgccaatctgggttgtctctggatttatctattgtggacatttcacgtaaatgaaataatacaatatgtggctttttgtatctggttaatttcacgtagcatagtgttttcaaggttcatccatgttgcagcctgcatcagtgattcattactttttgtggctgaataatattccattggatggatgtaccacaatttgttaatccactcatccactgatgctaccttcgttttaacttcagttacagcctcctgctgtcccttgagttctttggggagtgttcttatttttaatttctctaatggaaactttggtcagtgttctccacctgtaggctgggtattttgacatgttttccaagtggcttctggaaacacggaagcagtgattctgaaatggaaaagagaacattctctcccataggcccccctgtctgatataactccctggtggcacgcctcagtgagggtggcaccatcgcaggtgggagggagtatgtctatttcaaaagtgctggggcaggggccgggtacggtggctcacacctataatcctccactttggaaggcggaggtgggtggattacttcaggccaggagtttgagaccagcctggccaacatggtgaaaccctgtctctactaaaaatacaaaaattagccaggtgtggtggcggatgcctgtagtcccagctactcaggaggctgaggcaggagaatcatttgagcctgggaagtggaggctacaatgagccgagatcatgccattgaactccagcttgggcaacagagcgagactctgtctaaacaaaagaaaacaacccccaaaaaagtgctggggcaaagtggctgagcccactggtgaaaaggcgctgtggatggggtgcctccgacttgtgtgcagctcctcagttatggctatgccctggctgtgacaaggacaggattctggcacagctagtctaagatcatgttttggggtccttgctcagagtgttgccttcattctcttttatttttttcccatttatttagtgaaaatgtaatttatatacagtaacatctgcctcttaaaagtgcatagttctgcgtgttgtaactgtgtacaccacgtagttagtacacatggtgtcatgtaactaccaccacaatcaggagtactttcatcaccccctgaaactcccccagactcccttgtagttacctcctactcctagccccagcccctggcaaccactggtctgctttttgtctttacaagaatgtcatatacatggaatcacaccgagtgtagccttttgagtctgatttctttcacttagcataatgtatttgagatttgtctgtgttgttatgtgtatcagtttccctttatttctgagcaagagttcagggtttgtttattccccaattgaaggatgtttgggttgtttccaatttttggtgattatgaataaagccactataagcattcacgaacagttttttctctgaacacaagttttcttttcacttgggtaaatatgtaggagtgggattgctgggtcacatggtaggtgtatgtttaattttataagaaacctgcaagctgctttccaaagagctgtaccgtcttgcattctcaacagtgatgcatgagcattcattatctttcattatgttctaggctctcacattgatcagaggcaatatgggcttggcgttttaattgcaaggaacaaagactctgcctcccttgcctgttttagtttaggttccccagaagtggactctggtgcaatgatttgagtgtaagtagtttatccgggggtcaatgccaggaaactccccccacctccagcaggggagtggagaggggagaggaaaaggaaggtagctggtaaagggtatgtcatcaggcaggaagcctagtttctagaatccatcccctgtcagttattgactgagggctcctgcgggagtcttgtcaattccctggcactccagcctgcccccttctcaggagagctggctttgctggctttggcagccagtctcaggtgaagggtatttggaagtctggcccaggtgcaacagtgacagggcactcttcccaggtgatagcggttccttccatcctctttccatgacactccctctttctttttctttttttttttttttttgagacagagtctcgctctttcgcccaggccggactgcagtggtgctatctcggctcactgcaagctccgtctcccaggttcacgccattctcctgcctcagcctcccgagtagctgggactataggcgcccaccaccgcgcctggctaattttttgtatttttagtagagacggggtttcaccgtgttagccaggatggtctcgatctcctgacctcatgatcctcccgcctcagcctcccaaagtgctgggattacaggcgtgagccactgcgcccggcctaacactccctctttcatcttggctctgtctactggtggcttccttttctgcatcatactttctgctcattgtgtttctcttcatatgttcccactaccagctaactgaatgttgacaccccaaagagagaaaaattggttggtgagttagtcactgcttttctcttggacagagccctcaatttaagtcatctggtaggcacaccagtcattgttggctgcccttgggtcaagtggcctgccctgggccaaccagctgtgaccagggaagtgggtcagagagttcagagcagcgctgtccaatggaaccttctgtgatgatggaaatgttctgtatattatggtagctactagccatgtgtggccattgagtgcttgaagtgtggcttgtgctaccaaggaactgagtttttaatttcatttaattttaataaattaagatttaaattcacatagctgcatatggctagcggctaccatagtggacagcatagctctagaacatgggcccagtttttggcgattatgaataaagccactataagcattcacgaacagctttttctatgaacataagttgtcatgttcttggcctcttctctccactaaataatgtggtataacattctcttgagatcagttgtttttttttttgagacggagtctccctctgttgcccagactggagtgcagtggagcgatctccgttcactgcaagctctgtctcctgggttcatgccattctcctgcctcagcctcccaagtagctgggactacaggtgcccaccatcatgcccggctaaatttttttgtatttttagtagagatggggtttcatcgtgttagccaggatggtctcgatctcctgacctcgtgatccacccgcctcggcctcccaaagtgctgggattacaggcgtgagccgccgcaccggccaaggtcagttttttaaaaagccaattaatatctgatttgtgattctgaatctttaacatatttaaccgtctgctttttttttttttttttttaattcacagatgacatggtctttttttttttttattgatcattcttgggtgtttctcacagagggggatttggcagggtcataggacaatagtggagggaaggtcagcaggtaaacaagtgaacaaaggtctctggttttcctaggcagaggaccctgcggccttccgcagcgtttgtgtccctgggtacttgagattagggagtggtgatgactcttaaccagcatgctgccttcaagcatctgtttaacaaagcacatcttgcaccgcccttaatccatttaactctgagtggacacagcacatgtttcagagagcacagggttgggggtaaggtcacagatcaacaggatcccaaggcagaagaatttttcttagtacagaacaaaatgaaaagtctcccatgtctacttctttctacacagacacggcaaccatccgatttctcaatcttttccccacctttccccgctttctattccacaaaaccgccattgtcatcatggcccgttctcaatgagctgttgggcacacctcccagacggggtggtggccgggcagaggggctcctcacttcccagtaggggcggccgggcagaggcacccctcacctcccggacggggcggctggccgggcagggggctgacccccccacctccctcccggacggggcggctggccgggcggagacgctcctcacttcccagactgggtggctgccgggcggaggggttcctcacttttcagacggggcggctgccgggcggagaggctcctcacttctcaaacggggcggctgccgggcggagggtctcctcacttatcagacggggcggccgggcagagacactcctcacctcccagacggggtggcggccgggcagaggcgctcctcacatcccagacagggcggcggggcagagacgctcctcacttcctagatgggatggcggccgggaagaggcgctcctcacttcctagatgggatggcggccgggcagagacgctcctcactttccagactgggcagccaggcagaggggctcctcacatcccagacgatgggcggccaggcagagacgctcctcacttcccagacggggtggcggccgggcagaggctgcaatctcggcactttgggaggccaaggcaggcggctgggaggtggaggttgtagcgagccgagatcacgccactgcactccagcctgggcgccattgagcactgagtgaaccagactctgtctgcaatcccggcacctcgggaggccgaggctggcggatcactcgcggttaggagctggagaccagcccggccaacacagcgaaaccccgtctccaccaaaaaaatacaaaaaccagtcaggcgtggcggcgcgcgcctgcaattgcaggcactccgcaggctgaggccggagaatcaggcagggaggttgcagtgagccgagatggcagcagtatagtccagcttcggctcggcatgagagggagactgtggaaagagagggagagggagaccatggggagagggagagggagagggagagggagaggaccgtctgctttaaaaatgggaaatatcagtatttgaggcaatgaagtcaaaattgacctaatgagatgttgatacgattcttttcctgaagctttaatacatttacatttttatttttggaaactcactttcattctgtacatttatactgtacctattttgtgttgtcagatgtacgtgtgtgagttactgattttcttcctcacacatggagacacttggcagccaatcagcccaccaggaaataggtctgaagtactctcttagaattcagaagcacaagtggtgcccctgacagcagcctaagtgtgagtttctgaagtcagagccaaatagggttctgtgcagcctgaagattatatatgaatgtttttaactttgggtttttttttttttttttttttttttttgagatggagtctccctctgttgcccaggctggagtgcagtggcgtgatctcggctcagcacaacctccgcctcccagattcaagcaattctcctgcctcagccccccgagtagctgggactacaggtgtgcgccaccacacccagctaattttttaaaaatatttttagtagagatggggtttcaccatgttggccaggctgatctcgaactcctgacttcatgatccgcccacctcagcctcccaaagtgctgggatttgggcgtgagccaccgtgcctggcctaactttggttttaatattattttgccttggcttcaggaaatgaccaagagatgcctgattaagattattttggaatcattataatgggatggagcttcgagtagcattggacagggagtcaaggaaccagggttcctactcaagctatgccactgacttgctggctttgtgatctttagcaagtaactgtaattttctgagcattgctttctccatctgtaaataaggaattttgattacacatgcatctaaaaattattccatggcaccccattgcaggagatattaatagatacagctgaggaaaagggttctatggtcaaagttgttgggaaatatttcttactatatctcttggagattcacaatgtacattttttttttgagacggagtcttgctctgccatccaggctggagtgcagtggcgcgatctcagctcactgcaacctccgtcttctgagttcaagccattctcctgcctcagcctccccagtagctgggattacaggcgcgcacaccacacccagctagtttttgtatttttagtagagatggggtttcaccatgttggccaggctggtctcgaactcctgacttcaagtgatctgcctgccttagcctcccaaagtgctgggattacaggtgtgagccaccatgcccagtccacaatgtacattcttatatcaaaggctctgagaagtcctgcagtggaaaaaaaatttttttttcattgtattaacagactttggttaatatttaagcatggaatctcacttgtgtgtgtgtgcatgtgtaaaacatctcttggcatcttccagaatacagttatacaggcccatcagcttggcaaacagggatggatgattctttggcttttctgagttaaatgtctcagtgtccttggacaaggaagaagttaagtctcttttcaatcatgttctcagctttttctctcctctcttctcttcccctctcctccaagtattaaaacctagttgaggccaggcgcagtggctcatgcctgtaatcccagcactttgggaagctgagatgggctgatcacgatgtcagaagatcgagaccgtactggctaacatggtgaaaccccatctctacttaaaaaatacaaaaaaattagccgggcgtggtggcgggcgcctgtatagtcccagctactcaggagactgagggaggagaatggcatgaacccaggagggagagcttgcagtgagctgagatcgtgccactgcactccagcctgggtgacagagcaagactccgtctcaaaataataataataataataaaacaaaataaaaaaataaaaccttgttgataactaattgtgggtcttttccttttccctgacacacattctgcaagagaagacagatggcaggcaggaggcagattggagagaggttctcagcatgacttttctcaaatgtgatgctcctcaagagagtctatatttgttatcaaaatgagccacgtgcttgcatgccaccttgaatgctctccattgacatttgcaacttgtttctgtgtaattttgcagcctggttctgctcagttccagcaaggtgactgtcattaggcagatctctttccattacaggtgacagaagctcaactccaactagcttaagcaaaacaaataaacaaaaacctccagggcatttgttggcacatgtgcttgggaagttgagtcctgggtggggctcaagtcctaccatctggtgtttgtccttctctgtttcctgcctcctgcttcctacagctcttggctctgctgctttctgagtgttggcctctctctcctactaccgctcatccttctccccatgacgataaagatggccagtggctgtgtgtccttaaagttagctatccctcagcaagaaagaccacctctcccagcagctgtatgtcaaacatcatcaaggcatgattctcatcggggcttgggttttgtgtacacatctgaaattgatcgtcatggacaggggttcacgttctgtgcttcgtgagatctgagtcctgtgtgggtagcagggccctgatcagcagcctggcattgtaagtggggtaggactattcttcagcagtgggagggaccctgggtggactaaaaccacacttacccactacatgccctgcccactcccttttcctcctggccagggtgccctgagtagccttggcatgacgtgcctcactgtcatctgaccaatgagaatcatttgttcagaaaactaaggtccatagagcaaggcacagacctgtccctgggagctcagtgtcctgttgggaaggccgactcagagacagctttcattcttttgtgttactccgtgctgagctggttggggctcacagcggcctctttggacaggcagcagccttgcctcatcttaacctgtattgccaggaacccagcagccttcccacatgaatcaagttcatgtttgttatctcaaagtgctccccaccagcctttaattttgggggcctgctcaggtgctggactctgtcctccttgctttctgttcgttagtttttatcttgttaattcctttctgagtcaggtattaccagcctcttttacagatggggaaactgaggctcagggtagagaaagcctttgctgaggcccccccgcaggtgagtggcagatcaaggatgttgacctaaagttggtgctatgggcctaatgtttttgtgcccacacaattcatttgttgaagccctaacccccagtgtgaggtggggcctctgggaggtgagtcggttaagatgaggtcatgaggatggggcctccatgatgggattagtgcctttagaagaagaagaagagagaccagagctcgctctctctaccacatgaggacgcagtaagaaggtggcctgcactgaggaaccaaatgggccagcacctagatattggacttcctaacttttagactcacgggcaatgaattcctgctgtttcagccacccagtctatggcagcctgagctgatcagtacagtcggagttctcaacctccattggagtgagtgcctgggctccactgtactaaaagcaagtagtcctcctctggaagggcgtatgcatatttccaggcattttggagcctccagggaaaccctgggccctgcaggttcttgtccagaaccactggccacacgccctctcagccgcactcaatgccaggagacctctatggctgctcaggagtgggtccctgcctggggctgaagtccgggccctgggatctgcgttgggtcctgctgtcatggactgagctgcctcggttccctctttgggccccactaacagagaggttctctgaggacccccatcccttcagctgaacctaaggctaccaggagacagagggcatctgtggcctcccccagaaggctgtcctgaggttgtgcccattgtcttggggagtttactggaggaagctgcaggcctggactgtgcagtctgatttctttacctattttaggaacgatgctggctggatgggcgcgaaggctcacacctgtaatcgcagcactttgggaggccgaggtgggcagatcacctgaggtcaggagttcgagaccagcctggccaacatggtgaaacccagtatctataaaaacacaagcattagccaggcatgatggtgctcatgcttgtaatcccagctactcgggaggctgagacgggagaacgcttgaacccaggaggtggaggttgcagtgagcagtgagccgagatggcgccgctgcactccagcctgggcaacagagctagactccgtctcaaaaaaaaaaagaaatgatgctggttgttatcaagaagagcccttcccaaacacccagctaccttccaatgggcttttccttcccttcataacttgggtgttttcaagggtgaggaagtttaagtagtgaagccggtggggctggccaagggaacccgctgtctaatcctgtggctggaggaggaagcggggaaggtggattcttcatggagtcaaggaggctttcactgctttttcttattgcttctgctgatttcccactaggcttggatttggccatttgctggggttgggtgggtgggggggaagagttttttttttttttttatggagacagggtcttgctctgttgcccaggctggagtgcagtgctgtgatcacagcccactgcagccttgaactcctgggctcaagtgattcttctgcctcagcctcctgagtagctagcactgcaggcgtgtgccaccatgcccagttaattaaaaaattatttttgtagggctgggagcggtgactcatgcctgtaatcccagcactttgggaggccgaggtgcgcggatcacctgaggtcgggagttctaaccagcctgaccaacatggagaaaccccatctctactaaaaatacaaaaattagccaggcatggtggcgggcgcctgtaatctcagctactcaggatgctgaggaaggagaattgcttgaacctgcgaggcggaggttgcagcgagccgagatcacaccattgcactccagcctgggcaacaagagcgaaactctgtctcaaaaaaaaaaaattctttttgcagtgacagggtctgcctgtgttgcccaggctggtctcaaactccctgctttaagcgatcttcccaccttggcctcccaaagtgtgggattacaggtgtgagccaccgtgcctagctgtgttttgttgtctggcgctgctttagatgacccctgctgctgtcagattgcccgtctgggagctggggtcatacttgtggggtcataacagggccttgggcagcagactcctcaccgtggccaggcaagggattcccaccctgggttgggcagccctctccacaggatggcaaggggctggaggctcagcggacgggccctgttttagggattgaggacatggcaggtagataggcaataaaagcaccgaaccagccttaggttctatagcaaggaggtccagcaccgctcgtggacccaaactgtcctccaggaaaggcgggaggcagcttaggtgacctctgcacgtgttttcaaagctgtggttttggttgggagtttcatgctggctcagccacacaaacaatgacatggaacagggaggcgctcccatgtcagaagatgggtcctctccaccccagctcctccacactccccaccccccacagcccagccaggtccaaaaccctacatgctgcctcataggaaatggggtcccctgaggagaaggacaaaagcagacaattcctgaggacaagaggaagaggaggacggagtctcccttgtttgtgctgattcccagtgagcatcctctctggagcccactggggtttgggacttgcagggtgtgtcactaaatggcaaggaacaaggtagagacggctggcactcactgtctctgttgtggacactggcctcacccacagctccatgcacacgcctagatgcagaaattttctgtattggttgtttatccatcaccaacttctaaagcagcagatgggaaaatggaatgaacaaagtcaactttagaacaagctttgtgttaaattgagtacacataattcgattattttaaaaacaaagcccaagcagtgtttttctgtttttttgcatgcagtgttttccggtgtaaagagaattcactgccggagaagccccagcttagcttccttctgcccctgggcagccccgttggtttcagcagatggtcctgatgtctgaggacctgccacagtttgcgccagtccttccttttgctacttttgttgcccaagacgaggtgtgatttagtggttaaatgccagaatgctgggctggctggatttgaaccttacctcctttgagattcaattaggatgtgacctccgacagcttaatttccctgagcctctgtgttttcatctgtaaaatgggtacgataatagggttgttgagatttggcaggtgataaatgctgaccaagtgtttgctgttgcagtagttgttatggcagttgtcgtcactgtccccaatgtcatcactatcattctcgtcatctcaggacactgaggaaaggctgagctagtaatgaatagggttggactggtgctgcctctttagtgcctaagaaacgctaccctggccctgtctccaggccttgatctcaaggtgggattcatccatcatccaccacggcccaggagccagctgtcctcacttctggggtgacttgtgagtagataacaaagggggtgccctcaccctgcagcggagtccccatgggccttggggcccagagggagatggtatctgtttcccatgggcttcctgtcacaggcagatgacatctgctctctgctcagggtagatttgggggcctctgccactggctgactggaactctcttacctcattctagactcttccaggcagctttctgtttgttctctaacagaaacatagaaacaaaccagcatcttttctaaacaaagagggacttttcacaggaagtttgatgacctgacgcgttccccctgcttgttgaagcacgagcctcttctctgacagttagggtgacttgctggagaacaaacaatagacaatagttgtggcctacttcccgtgagaagcaagaatggtacaggtggatgttgggagcccccaaacccatggaaggggtttcctgaggacgtcctatagtccctgaacatgcagccgagggttcctggggtagcagcacccgtgtggttagccctgtaatgggctcacattatgaggcttccgtgggtaggccctgttcagagagctttgcgtgctctcatcctggggagtcagggttaggtttagggtcaagactgatataatggccaggcacagtggttcacgcctgtaatcttagcactttgggaggccaaagcgggtggatcacctgaggtcaggagtttgagaccagcctggccaacatggtaaaaccctgtctctactaaaaatacaaaaaaattagccgggcatggtggtgtgctcctgtaatcccagctacttgggaggctgaggcaggagaattgcttgaacccagaaggcggaggttgcagtgagctgagatcgcaccactgcactccagcctgcaagatggagtgagactccatcttaaaaaaaaaaaaaaaaaaaaaaagttgctgagttggctctccaagcctctttctcagagccaccttggagggggccagccagctccaaagcctggggtgttggcctttgggagggagggggccttgtgccagtcccccacactttgtctgctcctccagcctccttggagtaccttgaatgtaccttcctattgctgttccctctgcccagagtcccgtgctctcctctccacattccttcactgctcattggcattcagggttgggcataaatattaccttcttgggggcctgttatttgcatcctaactagcagggctcctttgcagcccactgccagccctgccattcttcatcacagtcctctgttcatctctttgccacttgtcaccaaaatgtgtaattgtaccttcattgatgtccagtcagccttctgtatctgcaactttcacatctgtggatacaactgaccgcagattgaaaatactcagaaataaaaggatgcttgggtctgtactgaacatgtacaaacattttccttgtcattattccctaaacaatacgttatagcaactgtatacacatagcacttacattgtattaggtattagaagtaatctagagatgatgtaaagtgtataggaggatatgcatgggctttatacaaatactacaccattttatatcagggacttgagcatccatggactttgccatctgaggggggcaccagaaccaatcccctaagaaaccaggggacaattgttcacctccatgacaggcccataagctgctctgtgcaggtgcaggtctgtcatgcggcccacagccctctctgcagaagaccctcaaatgctgggggaatgcacaaattagctggggggcagtctctaggagattttcagcagtttctcctgagaggtgtgaagctgagagttaagtagggttttgtaggtgtaacaataggcattttccttccagcagctcaaactgcagtgtgcttggcacgttagtgcaaaggaaaaaaactcacttcattcttaagaaagctctggaaatttcatctgtgtttgagtgagttggcatgctgggcccctggcggaacacaaatgtggaatttgaactctaccctacctcagagagcaaggctgaagcgataggatgaaatgcatttaaatgtcatgagtgttattattagtcgtaatcttatctttgttaataataataacaggacccgcctagaagtgactgaatagcagaccgggctttcgtaagtaagctcacactgtcagatagcaccaggacctggggtggcgccggcgccgttagggagggagtgttcaccggaaacctgcccgggccacacgtgtacagccacatcctccacgccctttgggcgctggtcattcagagaggccctctcagacacgcctggcctctttagaggctctctcatcccctcgagctgccaacacaatcaagggtctgcaggtttgggaactccaaggcagtttctctttaccaagttctctgcatagccttttgccttctattgtttgctgtcccagagactggctgaaacaatgtgtttcctacagattttgtttgcctgcattgacttctttgtttagctctagtaaacagacatttagcatatacagatctgcacacttgacaaagaggaatttggagccctggacggggtggctgcactgagtcaccagctccttgaacctgaagaccttggatggtccggagctcgtaaatgactcaccccatcagtgctgggctggtgtgtgcggggttttgtcgccacctttggcaatggaagaggggaacgtggggcctttgactcgtcagggaaaaacaggtgtgtgagcactaggttggtgacgaggtttagcagcaggtggactctggagcgtgactctggagttgccagtcccagctccagcactttgattagctgtgtgacgttggggaagttgcttgcctaatatgtgtgtgtttcctcatctgtgaagacagcactaacctcgtaggtactcgggaggctgaaggagttcatctgtggaaatcatttggcatgatgcctactcttattccttgtctgtggggccctgttttgtgggcttgccacagtctcatgactctgctgggaagagccttcctgcgggcccccttgagctaggaatagaacctggatttctggccctgtaggctgacgcggccctcctagatgtagtggtgatgccccgttcagcagagatggttccaaatgttctgaacttctgccttgtatgggaccctgtgccggctgaatcgcatggtagctcagggcatagatgctaaatgggacggtcctgggtttgcaccctggcctctgctctcaccagctgtgtgagcttggatgtgttacttgttactcagagcttttctcatgtgtaaagctgagtgcatgaggccgggcgtggtggctcacgcctgtaatcccagcactttaggaggctgaggtgggcggatcacctgaggtcaggagttcaagaccagactggccaacatggtgaaaccctgtctctacaaaaatacaaaaattagccaggcatgatggcgggtgactataatcccagctactcaggaggctgaggtaggagaatcacctaaacctgggaggcggaggttgcagtgagccgagatcatgcagttgcactccagcctggatgacagagcaagattctatctcaaaaaaaaaaaaaaaaaagaaagaaagaaagaaacaagaaactgagtggatgagatctctatttcatggggtcgttgcgagcattaagtgtgctagtgtttgtgaagagcttgggcggggcctagcacagagccctgcatagtagaggttttgccctgacccatgagctgagcattggaaataccacagaatctggagtggggagcagaggaggtgtcatggtccttaaggcctgacctgtcagatattcacagttgtctgtgtcacttgttctcgcattgatagacctggagggacagggaggccagcccgttgtggaggggactccgcaggctgagggttgattctggctctgagcaggcttcaagcagaagctggctagccccttggcagggaggtggcagtccctctctgacgccttccaagtcctccccagtccttctaggattcttttacggaaccaaagataatagtcccctttgataccacatacaagccagtcgtattccatgcctcggaatatgaacaaaaccagaccggcgatggcttaagcctcattgagaggcccatttggatagcaggagattacatggggtcatgagtagacagaatgtggatttccagaaggtgcctcggcagctccactgtaggcataaagcaggtgattttgagatgtgtccactggcacctgttctgaggctggtggtgtcgggggttgtggtcatcacaggttgcattaaaagggggctttgatggggtcttttccagatggagctgctttgtgggattctgctgccctgccttgggatagcaggtcagcagagggtgagctcaggagctgcaggctacgtgtgacgtttaaaacatattctacataaactcatccatgatctattcatggtgtaatggatgtctggggcagggtgctagcttcagacgctccagcccaggctttctcaagccctcccaaggtgctgagacatttggcaccctcaggccacaagtgtggatgggccgcggctttgacccacaggggaactcatctccccaagctttgtccccatgggtcacctactttgcaaccctagtttcgtgatttggttaatggtgtttaagtggctgagccatgtatctggggtttttcagtgccgtcactattatttcttgttgagatttttgcacagtctccttccctcaatcctatgtgttcttttttttgatggagtctcgctctgtcaccaaggctggagtgcagtggtgcagtctcagctcactgcaacctccatctcctgggttcaaatgattctcctgcctcagcctcccaagtagctgggactacaggcacatgccaccacacctggctaatttttgtatttttagtagagacagggtttcaccatgttggccaggctgatctcaaactctggacttcagtgctcggattataggcgtcaactaccgcgcctggcctatgtattcttttaaacttcagctcattagagctgggtttgtgtcataagtgagagagccctgaggtgcttggtttgaagcaaagcttggttagccatcagcatctgattggagactggtcccaacccacccatgccgctgaggaggggacatgggtgctggccagcaccgagattagaacactgacccggtgacatgggagactgtggtttccctcatggtacagaaacataaaccatacttgtttttgagatgtctgaccctgacaagactgggaaatagagctagcgactgataagtgttcaggggtggggctgcatgtgggcattgtaggaaaagcgcactggcgagaggcgtacagagggatcccaggcgttagcttccattcccagcttctgtagggcacttacctgtgcttccttcagaaggtgaccaaccagtgaactctgcatgttaccttggccttgtatagggtggctgggtcgtcagaaacctgggaggctctggacagttgactttacttggctgttctttggtgtttgttccattcagtgatgctgctgtgcctcttgaggtgcaggtgcaggctgggtatttctccctctagactgttgcccacagctggaggcaaagggagtccattcatttttgcctgttgaatgaagttagagttttcggtttctctgtccccttagctgaggggctttcacatcctttaagagagctggcgccctctgggtggaacactgatcgggaagtcagcacccaggggttccagccttggttccacctctcactgggtggcctggggcacttgtggcctgtaagtacctattgttatgagagagttgctgtgcaaacaaagacccttttagtttaaaccttcttggagacagcaattttgcaaagcagtaagaacctgggatttgaattatggtttagccacaagctagcttcctaagcactcagcttcctcacctgtaaaatgagctcatgatagacccagcctctctgggtttggggaagattgagagcatgcaggcccaggagcatggttcctggcacatgggctcagcttcgtaggtggtggctcctctattactaccctcatgagtgtgatggttttattaccaccagagtgaagttcctgactgtgaggtttcagacgggataagcgcctggagtaaagtgtcagggcacatggttgatcagtatcttgggtttctcctctccaagcagtgacctggacttgacctactagaaatgggatcaggtctccagagagaggaaccaccttggctctttgacctcggtcaggcttggataccgggcctccaggtgaaagcctcaggtgctgttatcacttcctgagacagccagtcctctcacttctgtgtttcctttattacactttactatgaaggagaattgatacagaggaagaaaaacatacagtgaaccctttatttcctatgataaatgatgatttttggaactggggtccagtctgaattctctaaggcatgcttgtgcgtgtgcacgctctctctctctctctctctctctcgcacacacacacacacacacacacacacacacacagagtaatggttttaaagtcatgacatactgtgcttttggctgctgctgtttctgactgatgaccccaatgagactccaaaaaattagatgggtgcgtttggaaggcattcagaaattactcattggaagaaaaatgcagcgtttggaggaaggggagggctgagcatgtgtaaaaatgagtgttatgcgcttagtgttccgaattcaacatcagtgaggaaagggagggccgcaggagtttggggaccgtctcgctaagcaatactgcaaacacagacagtgacccgattttccatagctgtgctagctcctcaggaggttttgagaatccccctcatttgggtttgaaggaggtctcagtgtccttcctcctctgtttgccagattaaagtttcatacctcagagctgggatacgctgggttttgattgtaaaggcatgcagctcagactctgttgtaaatggtgagtttttcttttttttattacactttaagttttagggtacatgtgcacaatgtgcaggttagttacatatgtatacatgtgccatgctggtgtgctgcacccattaactcgtcatttagcattagatatatctcctaatgctatccctcccccctcctcccaccccacaacagtccccttcctgtgtctatgtgttctcattgttcaattcccacctatgaatgagaacacgtggtgtttggttttttgtccttgctatagtttactgagaatgatgatttccaatttcatccatgtccctacaaaggacatgaactcatcattttttatggctgcatagtgttccatggtgtatatgtgccacattttcttaatccagtctatcattgttggacatttgggttggttccaagtctttgctattgtgaatagtgccgcaataaacatacgtgtgcatgtgtctttatagcagcatgatttatagtcttttgggtatatacccagtaatgggatggctgggtcaaatggtatttctagttctagatcccttaggaattgccacactgacgttttaaaagtgaaatcagagagtgtttttggttttcttgaagctgcctttgacattttagcaacacagctgggagggtaaggtagaaaactccaagaagttggaattcaactgtcaaagtcaaagcggggatggacttttgggagtcctgccacagcgggacctgaactcaagtcttaacttctcctctagggctcttgtgtgaaagaggaatagcttcctgcagttcacaagggtcgtaccatgatcaattattattacgttacacatcacttctgtaccaatttatattggcacatgaagttaatatatccctatatccatgcattgcctttgtgatttgggaaaatccgatgccttggccaaacctctgaatcatgtgaccacgttttagcctaatttggtgaacaaatctttaacctccatgtcttcaagtgcagcatcagtgggtcatggatccagaaggttggctgattgggattctcttgctgggtgctgccgcaccttgtgtgtcgggtgccgacaccttgatcatttcggccagacccccaagagagcccacagaccaccatgctgggtggaggcacccaacacctggctgactgcgtgaacttcttgcttcccagtggctctccaaactagttgtggaggacgcgaaggggtttcctgatgtcaaaataaaaataacgatgtctgtagtttcccaggaggaataattgttgatgttgaggcatgatctctgcatgcattctgtacctgctccagggtgccagtggaggctacacccctctccccctcttctgctctctgcgacacccctgccacaacagaccttgactctccaggctgggacccaggaatccgtactctttcaaaaccactttattgagtgtaattgacagacagtaagccacacatatttaaagaatatgatttgagaagttaggatatatccatacccgtgtgaatctacataccacaaacaagttatccatcactgctgaaagtttactcatgcccctttataatcctgccctgtcatcccttcctgtcccctgaaccctaagcagccactgttcttgctttctgtcgctctggattcgcttgtattttctggatttgcttgtattttctggatttgtctatagatggaatcatatagcaagtaccctttctcatgtgcctttacttactcagcatgaagattttgagattcatctacactgttggcgtatcagtagttcattcctttttcttattgagtagtgacccactgtatcgatagaccacagtttgtttacccactcaactgtttgcgcaggtgggttgtttctagtctctctatggacagagatttccttttctcttgagtaaatacttaggaacatctggatcatatggtaggtataggtttaacttttccagaaattgacaacctgttttccaaagtggttattctttgggacaaggaatcgttgtttttagataagcttccccaattctcctgtggcctctcccttcccgagacggtctaatggccctgagcgatggctcctatgtgcccgtctccacctgttctctcagggctagcttggccttggcacctcactgcaggccgcccctctgcttggggtgctggacaagcagaaggggaacactcaagttctttctctccataactgccttcgggaagccatggcagatgcgttgactctctgtagggctggcaagctgtgtggcgagtcccttatccaatgtcgctgtgtcccacagggaggtcttaaagaggcagccgacttttgtggcctccttgtgaaagcttcgatgcctcagggatcatttctgagctgactgctagttggacttgggcccactgaagagacagcctgggatcggatgtccagaagagacagatctgagcacgtctctttcctctccctcctcttttcttcttagcccttccacctatcactcattcattgccccttcctaggttctgtattcatttgctgggggctttaacaatgagacgttattttctcccagtctggaggctggaagttcaaggcctaggtgccagcaggattggggtccctggagccctccctccttggctaggagatggccgcccccttgctctgagcccacatggtccttcctgtatgcacctgcaccccggtgtctttctgtgtcctgacctcttcttttttcttcaagacggagtctcgctctgttgcccaggctggagtgcagtggtgcagtcttggctcactgcaacctctcactcctgggttcaagcaattctcccacctctgtctcccgagtagctgggattacaggcgtgtgccaccatgccaagctaattttttgtattttttttagtagagacggggtttcaccatgttagccaggatggtctcgatctcctgacctcgtgatccacccgccttggcctcccaaagtgctgggattacaggcgtgagccactgcgcctggcccctgacctcttttataaagatatcagtcacactgggctggggcccagcctaatgaatggcctcatttttgcatgatctcctctttaaaggccttatcctcaaatttctccaaatacagtcatgttctgaggtgctgggggttagaacttcaacacaggaatttgggggcatacaattctgcttatcacaggtgctgagccctgagtgcagtgcttatgatagaaagatgagctggatagttcttccccttgtgcagctcagcatcctgggggagagaaagtgggaagatccagttttctgatgaaagaagatggaaggaggagggctcggtgctactaggggggtgggagtggatggttaagaccaacttgactccagtgacagcagcaagggctcctcattcctgttgatggtgtgtccttcaaaacgtgccgtggttctcaaggagtgagtggcggtggcctgcagccctctggcactttgtggccgaggccagctccaacgctgcagggcaagaagagccacgctgcagggcaagaagagccacgcagcagcactgatgtgcgtgccagtaactgcctggtgttctagtgagtgctctccctcgaggagcctactccattctctaggggatcatgtgaaaagtagagcagctttgggaaagtgtgaagtctctgttgtgtctctggagaagttatcgcctggtttgcacatgctggagggtggggtggtggtggaggaggagggcgcatgatgcctacaacctggctacactggctcttttcatccttgaattcctgcctcaggaaccctacaaacccagtgcccagagtattgcactggggccagaatgggaagagccctgaatacaagagaactgtggtattggggctatacctataagcatcaggaagtcccctgctctgtgcccagggagttggaggccttagtacccttatctctggaggcttctccctggccgtgcagaacagctgcaggaaagggggaaagcaacttaacaaaaattggtccagggacaaattatgcttagtaatggattatcccaaacatgctttgtctgagtgtcctgaggccatggtgacaaaaagttagtgccgtaacacacacggaatcaattctctgagcctgtgcactgtcacacttgttgcctcaagctcacaaatggagtttttcttgttggttttaatacctgcaggaacgtgaatgtcggctctccagccagcaaggccagcgcccacccatccatccctctgccatcctccataggtggttctgatggctctggtcagctgtcattcgtcctcccatctctcagcctttgtaggatagttgatacctgttttattcttttattgttattttaggggtctcagcatggaaatatattggtgtataagtacctgttccagtccttgttttcacttctcttgggactatacctagaattggaattgctagatgctatggtaattccgtgtttaattttttgaggcactgccaaattatttttctcccagaatgctttggaggcaatgacttcctgtttccttccttccttccttccctccctccctccttttcttttttttttttttttgagacagagtctcactctgtcacccaggccagagtgccgtggcccaatcccagctcactgcaacctctgcctcccgggttcaagcaattctccttcctcaccctcctgagtagctgggattacaggcgtgcgccaccacgcccagctaatttttgtatttttagtagagacggggtttcatcattttagtcaggctggtctcagactgctgacctcatgatccacacgccttggcctcccaaagtactgggattacaggcatgaaccaccacgcccatctgatttcccgttttctgcagggtaaagcctcagggccggcccattgctttcaggacttttctcactctgtccccagcacaaggatcttctccatctagatggatttgccaccatgtgctgcctccatgcttgggctgggtcattctgctcacatggacacctcttcaccttcctctcagggactctgcacatgctgccttcactgcctccttgggaaaaaattgctcctcccggctgctcccaaagcagttcttgtgggtctggccagggacccccctaaccctactttactaactaccctgggttggcagtctctgccccgagctctcctgttcctctcccctgctcttgagctcccattaggtgtcgagcacccagaagtggtgatggctcgttcattttggccatgtctgtgcacggctcacccctggtgcttgtatgcggatgcttgtgaccacacagcctgtatttgagccactgttctgtaatcagcctctcctgtggtggcatcttcttcacagggagggatctggccgacctcgggtcttagcacggctgagcctttgaagctggcaggttgccctgggttcccggggtggtggttggccgcctcttctcttgggcccctgcccatttggaagcgtgcccttgagcactgccatccccgagccaggccatcaagtcatccgatcccccgaggtggctgagaagctggctgaatgtccctgctgtgaaccagtgatggagaaccaggctgctacttagctttgtagatggattcggtaaagactaaatctcttatttctaagacgtgatctcattgcacagacaacagcctgagtggcctgtcacccaagcagaaatcctggagacatctgttgagcctatcctgtttctcattgccattggtgacctccctcctgggcatctgtcccttgccctcccctccttggtctgcgtctcttgctctgctggccactgtcgctttctgtgtgatctccccatgccagtgtgccctgctgtgatttgccttttcacacagcacctcttccttgagttcggacccaagctgcactctccaaaccactgacttcacttgctcctccccccactcacattttggggccctaaattactttagtatcgtgagtgagcactgggctgtctctttcacagtctagatttgcacaaacctttctctgagcctggaccattctcccaggtcttcaccaggccagttcctcctggagctccagactgcagcagagctgtctcttgctgggatgggagacacttctctggccccagtgctgctgttccccctgctagttttccccctttccttggcagcccgtctcaccaggctgtcttgtaacagtctgttttccttgtctgtctccctcaccaacctgatgtgtctgcactgctgtgtcctcagctcctagaccagggtcgggttccggctggggcaggagaggcgtgtgctgcggccctggatgggctcatgggcagatggactatcgagcagatggatcaaggccccctgtgggtccaggtttctccccagagcctgaagggttggccccggtggtctgtgacagcttcctgctctggtggtcagcagctgggcacagaactacctggagtggaggtgagatcccaggagttgtcaggagagtccagggttggcgggggccccagaggcttccgggaggcttctagaagctcttgagcgctttctcctgcccaacatgaatgtcttgtcttaaaggtgaggccttgtgagaaagcaggactaggtgaggccggaggagtgacagtcgcccagttgatgctgtggagttctccaggctgctggcccatccagtccctcctctaggccctgagttactgtgtcactggggcctggtcctgctgcagagttggggcacatctcagggcctttcagagctgataaggggcctggcctgctttcagttttttggttttgttttgaggcttccagttcattaaaacaattaaaatgccctaagaaagctataaatattaatattatggtattttaaactggtaacctttgtcaggatggtgttttttttttaaaccaaaaacaacatagcaatataattagtctagtcacaaggtaatgctaggatttataggaaatattaattcatagtgtgctcagtctgggtggacctgtgatgggacgggagtgtcctccagccctgcagctcaacatggtcacatttggagatgagatgaagtatttgactttgaggcttctgtgaaaatgaatccacaccccattcccacctcgtcccctaacctgcacccctccaagccctgcaagtccttcttctaggctgggaaatgaggacataggagtgaggctgcagggaaggagtgagacatacacgttcctgaggccttgagttccaggcttcaggaacgcctgcccgtgcccgggctctgtattccctggccagtgctgatggtgtctctggcaaaaatgcaagtacccttggaggctaggccttggggtggagctagctcagacacctgccctctgggaacattgccttcttctgctttctaatgctgatggcttccctgagatcccagagtcatcaagggtcaccctgcagatgggaccatgagccccactccccaaaatgtggcttgctcaaggtcacataggtagtagcaaagctgagacgtgagcctggcccttcaaagcctaaattggggataactctggcaagagaatgtttcaaggttcatctttgtgtccccagagcctggcatgtcatagggagatagaaagtatctgttgaatgagcaagagcagccaacatggatcgagagccaggaactgtggtaactgcacatctgtctgatctcattgattcctccccagctctgggcagtgtacttcggtactcggatcccctgtgggcagatgaggaggaagctgggtacaggtaggaaatgaaacctgcccaacatcaaacaaccagtcaaggaagctgaggtttgggcccagatggtgtatgtcagagccactgtctaggccagcgctgtccagtggaaataaacgtgagcctcttatgaagtagaaaaaattctagtagccacctttagaaaagtaaaagaggaacaactgatattattttaataatattttaataatatattttatttaatccagtatctgcaaatggttatcattttagtatatcattaatataaaaatccttttcttttttgtagaaatgttgcctgggctggtctcaaacagttctctcaccttgacctcccaaagtgctgggattacaaatgtgagccactgagcccggctatttaatccgatatgtacaaatgatcattttagtacaccatcaatatgaaaattattaacaagatattttacattcctttttctatgctaagcagttacaatccagtttatcttacctcagagcacctctgaactcccaccagccacatctcaagtgctcctcagcttctgtgtccaggggctttggcgcagaacaggctgctgtggcctctcagtcgtcagtgggtgaatattgggagttgttagccatttggaggtgtgggaagcatgaggaggtgatgaaagggcctaacagacagaggtggagggtcaggcctgagcctgtgtactgggctgccagtgacaccacgtgtctctcccaagtgtgagtgctggatgcaaggctgccgtcctggcaaagggatgtctcactggggcctctcgtggaaatggaggggaggtcctgggcagggctctgcagagcacaggcatccgagctccccatcctgggctgcctggaggacttgccagtctgcgtggggatctggctctgagctctgttgcttttggccaagggctgttgcaacactcccggagcccagaacaggtacgatgtgttcctcatgaaaggttatgaggtttcagacataacagaggttctgaggatgcaaagagaggaggtctcagggctcatgtctagagtgaagtcatcagacctatacatcatgggttcacgttggctggcatctctaagcgcacctcaggctgggggcaaccagtactaggggcgacaaggacagactttggtggaggtagggggagcactaagggactcctgttttctcaaatgggtctctaatgaaagaggttaaagaaactgtcacttaaagcatttcctgggttggtcctgagtacagtgggagggtgggtggtaagaagaaacctccctgggccaggctccccaaggctcgattcctgggttgggggcagagattggaggaatctgtggccagccctggcccagacagtttctgaaaaagcaaatcagggtttgtaacagttaagtctgtcccggggaagtgttccattgcaccttgatttatgccactggaaacattttatactgaggactgtccattggccaaacaagccttggggccaaaggcacagcagggaagatggttgctgtgtgaaccatcagctctactctgcttgtggggaccatgggcgcagttcttaaaagcccgcactgggtgatgcagaaatggggcggtgacacggtaaaaggagcggtggcaggcaaaaacttttaacaacaacagtaaaacctgttttataaaagccatatccgtggaggtaggaattgggagcagggagccgctgagtgctggggctgggacctggccagagtagggagggatgaaggacccctgtgatcaaggtcaagtcctcacctcatgacttcctggcagaacgtccttgggcaaggctcagcttccctgtctgcaaaatggggctcataacccctcctttccttgcaagctcatattagatgctgcatgtggaagtacagagcaaagtaccccacaaatccagggggttattctttctattaaccccactgtgaatgttttactttcatttttattaaccccactgtgaatgttttactttcatttttatgtattctgtagcctttaggtgtcatgttactttatcaggattttaaaaacttttcattatgaagcgtttcaaatgtactcaaaaaatagagaggatagtgtaatgaacaccctgtaccctgcagccaccactacaactcttaactatttcatcagggcaatttgagctcactgttacagtaatccctttcattaattgagttcccaaagtgctttaagtcctttgaagtaaaatcttcactgcacaagttggctcaaaatctgcccccttgtttgggaaaaagagtgtttttgtatgttaggtttttttgactcattcttgccacagtctgtgattggatttttcagtaccatctaattgttggttgtacaatatagagacagtcacacgtgggggtctggagggccccagggcccccctcagccttccttaagctaccagggcaagttcaattctctcaggagtttgggggcctctgttgactctgcttttcaatttgctataatttgaagggaaaaggttgttctggagtggctggcaggaataatgaagggctgggaagtttgttgtctccggtcagcccgcctcccctgttgcagcccgccatgcaggcaccccttggaagcggtcactttggggctggtcacccattcccttgcctggaggcagaggttttggtggaaaaggtggggaggtgaggggtcaggggatgaaggccgattgtttttatctgtttgggatcaaaggctcagtgtgtataacaagcttctggtaaaactctttttcttgtccgtaagatggcattggtgatgactctgggcagttgtgaggatgaaatgtaaggtccaggagatgtcctgtctgtcttgttcactaatgtgtcccctgtgtctagaacagtgttcgcacagagcacatgctcaataaatttatattgaagaataggagggaagggagggaggaaagaaggaagaaaggaagggagggagggagagaggaagggagagaaggaaggaagaatggagaaggcagggagggaaggaagcaagggagggaaggagagaagaagggagggagagacaggaggaaaggagggagagaacagggagagagggaagaaaggaagggagggagagagggagggaggaagggagagaggaggaagggaaggaggaagggagggagagaagaaagagggaagaaaggaagggagggagagagggagggaggaagggagagaggaggaagggaaggaggaagggagggagagagggagggaggaaggaagggaagaaggaagggaggaaagaagggagaaggtaaggagggagggaaggaagaaaaaagggaagagaggaagaagggagtgaaaagctacatctgtccgtccattattaataattcatcacaaatctttcatttcaggataaggaaatgtcattaggccctcaaggaaaaaaatgcctgttttcactctgggcttagaattcttttctcttcttttttttcttgtagaaattatatttccatctctggggcttagctcaactgatatctcacctcttaaattgttttggccttcctctggcaaagtccagccccccacccactcccacactgctgtccacacctcacaaagcagagaggaggacggctatgactgcaccgtatccagcgccggggctatgtggtcatgggatgtgtgtgcaaggctggcacagtcatctcccccataccatagaggacgctgaggctttcaggtgaagtgagttgcccaggtagacacagccaggaagcaggcttagatccaaacacttgtctgatcccaaagccctgctcattccccgtcctccctgctggccctgggttcatcctaaccctttgcttttagttccccctctctggactggacggtcctcacaggtagaacggcctgtgcctgtgtcctctgctcttagggttagcccagagcggggaggccgtgggtgtgcagtaatcaaactgggcacatcctctggggctgcacctcatgttagagacagtggtgtgggctctgttcccctccccaccctttctgcctgcagagcctccctggagtttatgagtcctgatggaggtggggaaggccgtggcttaccgtcgacacacatcagtacccggcaggagtggcagaaggtctgtggacagggcataggggtgcagggggaggagaaagtggaggggctccaagcacccgaacataagctccatggcagccaggaccttgtctgtcttgcttgttgtagttctagtgtctggttcagggtctagcaaatagtaggtgcttaacaagtaggtatcgactgggtggcctccgagccctgcttccctgtttccccaaagctttattgtgggttctttagctactgctgagatgcagataggccaagctgagggaccatcccgtgtctgtgaccctgccctggagtggaccacatctctgctgtacctcactgtgtcactgctgcagcaacatggtgggctcttggctggctggaacgtgaccccacaccctgcgtctggttggacaagcatccctcagcatggactggcttaggtgtgtgtggggagtgggggtggttgattcccagggcagcaggccggctgctcttcctcctccctgctgttcctcacccacccggcctcagccactccattcctggatgcccatgtcccagtggcggctggctggtcatccagaggcgaatgcggaacatggtgtctgagctactaacctcccaccttgggtatgcccttgaacttttctgtaagccaggctttccaacccccaacagcactcaggtcacattcccagagagcctgcacaagagggctgagtctgtttatttttcaagatttcaaaaaacatgccttttccccctctgaccttaagcaaaacttttttttccctccaacacttgtatttttaacttcatgagaaaatatggtaaaagggagcagattttattttcagaaactgtgatttttcaagatttttttttatttaaaaaagaaaggctttgggggatggggagaataaagatttttgttttgttttgttttgggtgctaagggggcccagagccacttctctgtggcccctgctcaaactcctccagagattctggcatgttgaggctgcagctcttttggttattgtgatcaaggatttctgggcacctttccttccccttttgaagacttaggactggaccagctaagggctgtaaacaagcatttccctcccttggcaggaagtgcttaatgtctttgcttttgggaaccggtgttctgggcaggctaggaggccgcacctgacctgcctgtggctctcttcccactgtgggggtcagaagatggtggctgcctatgtgcatgtcacagatcctcacttccagctggtggatgtaggatctgaggcccagagagggttggtgacttggccatagtcacacagccacctggatagagatgagtggtgagtggtgaacccggagaaacatggcttcttgcctccttggtctttgtgcacgggcctcccgcttcccgagtctctcctggcccagcagtggtttgctgaaggctgttttattttaggcaccggctgagctacctctgatcttgttgggttagcctaggtgtggttctttggtttttcagtttgtataaccatgttctttgttcagctcctatcagggttagggaggtcaaacacctatgtgtcaggatacgcctgacacacactatttaaaactcacactgttttaaatgtatagtatttaaaactttatggtcagctgtacttaccggctgagtacagaactaggaaagctggtggctacttgcaaggagcagctgcttagtagcggaggttgagtaataaggaccccagttgctgaacagctcctggaagactatctgttcccggctgggcgtgatggctcaagcctgtaatcccagcactttgggaggccaaggcgggtggattgcctgagctcaggagttcgagactaccctgggtaacatggtgaaaccctgtctctactaaaaatacaaaaattagccaggcatgttggcgggtgcctgtagtcccggtgactcgagaggctgaggcaggagaatcgcttgaacctgagaggcggaggttacaatgagctgagatcatgccgctgcattccagcctgagtgacagagcgagattccgtctcaaaaaaaaaaaaaaaaacaaaaaacaactctgtccccttctccctgtggccgtcacctctaacctctacggctgttattctggttcagtctcatttcttctctcggacttttgcaatagcccctaaaatgctgtcctcctggttttgctgacatcgtgacgattttaaagctgcatctgaccatttccttttcacaaagtggttctcacttctgcctctagaaggcaggcactgtcttcccttcccaggtaccccgcaatccagccattcccaaggactcacacagcccttggaaacctttctgcttagaatgttgtcctgtcctcttctgcttggtggctacctacttgtccttccgagtccctctgagacatcccacctccggggagccttctagattccttgggctgggtttccccttctgtgtgtgtgtagccttctgctcacatcggtcctgcaacagccctgtgttgagacataatcatctcttccttgtttgtctcatcttctgggctgggctcctctaaggaggggctgctttccatccttgtgttcctggcagcaaagccactgcctgtccaagtcagagacaggagcatgattattcagtgaatgagcccaggatggagtgaggaggattgtgggagaacaggagggtcagacagattgttctgtagtggtggctttgcagaggggcaagacttctgcaagtcagtccttgagggatgagcggacattagattggtaggtgaatttgggatgggggatgtgctagaggccccagagccagccgcagggtatggggtgatctggctggttgtacatttttctccatgatcttcatgtttcgtgtagactgatcccttctactttctgaaagctgccattggaggtgaagcagggctcctttggatttgcggtatcaccaattcggcaggagatgcagtgaagctacacccagctagacccatttagctacacccagggttgggcgttcagcctggcatccttggaaaaacaggtctgggtgcaggctccctgtggccactggcaggatcctttgttcagtctggagctgggtgtgatggtgtgaccacggctgcctcgggcgctggtgggtgcagagctgcttcctggagccaggaaggaactgctgctgctgcctcctcctcctcctcttcctcctcctcctcttcctcctcctcctcttcctcctcctcctcttcctcctcctcctcttcctcctcctcctcctcttcctcctcctcttcttcctcctcttcctccttctcttcttcctcctcctcttcctcctcatcctcctccttctcttcttcctcctcatcctcttcctgatcctcctccttatcctcatcctcctccttcttctcttcttcctcttcatcctcttcctcatcctcctccttatcctcatcctcctccttcttctcttcctcctcatcctgctccttatcctcattctcctctttatcctcattctcttccttcttctccttttcctcctcatcctcctcctccttctgctcatcttcttcctcctcctcctcttcttcttcctccttcttttcctcctctttttcctccttctcctcctcttcctccttctcctcctcttcctccttcttctcctcctcttcctccttctcctcctcttcctccttcttctcctcctcttcctccttctcctcctcctcttcctccttctcctcctcttcctcctccttctcctcttcctccttctcctcttcctccctctcctcatcttcctccttctcctcctcttcctcctcctcttcctcctcctcctcttcctcctcctcctcttcctccttctcctattcctcctcctcctcttcctccttctcctcctattcctccttcccctcctcttcctcttcctcctccttctcctcctcttcctctttctcctcctcttcctccttctcctcctattcctccttctcctcctcatcctcctttcttcctcttccttcacaaacacatggtgcctcggcttcacagggatagcccccatgttcatctgctcattgcttctgggttgctgccttgggcaggtggctattttggggtctttcagataatttaaaaaaacccaataccctaaacctccccaaacctaattctcaccctcagggcctaagtacatttgaaattgcacacaaacttaaggttgctgtgtgctagatgggatgcggtgagggacaaggctctccaatcatagtttttcctaggtgtctgtgagggattggttccaggacctcctgaggataccaaaatctgcagatgcacaagtccctgacagaaaatggtgtcatatttgcatataacctatacacagcctctggtatattttaactcatctctagatataatgtaaatgctatgtaaatagttgctatactgtattgtttagggaataatggcaacagaaaaagtccatacatattcagtacagatacagtttttttttttttctgaatgttttcaatccatggttgattaaatccacaaatgcagagcccgtggatatgggaggccaactgcgtgttgactttatgttttacaaagcaccctctaatcattgaatactgggaaacttcaagctctgggccaggcactgcactcagcatttggtggcttcatctcctgtcatattctggagccgtatgaacaagaattttcccatcttataaataaaagagcgaagacctgaagaagttatgtataagctgttgtttaaggttatgcagccaggaagtggcttactctctttgaatcttaccccattcttgtgaaacaggtggaggacatatttttatctcccatttaacagacaagagacttgaggtggctggatgccgtggctcacacctgtgattccagcactttgggaggctgaggtgggtggatcacttgaggtcaggagtttgagaccagtgggtgcttttctctggcgacgcccagtctgtttcattagctaacagatgctaagctctaccatgggatagttgtaaaaccttgaatgcaaagcttgaatacaattgaggagcagagatggggtatacagcaagcactctgtgtattaagtgattgttgttcctcgtctgtcttttgacctcccagtgcacagccatgggtctgtcactctggtgacctttggccgtgggcattgggaggatagtttatgttgactgcggattgccaggtaccaagtatcaggcaaattggcttctttgtacattcctccttccggatagaccttgggcctcctcgtcactgcccaggagatttgctgggaatctaggagggagtggatgatggcctggatgcctgggtggtgctgcctctgccccgaggcagcagtcagtgccagggtggggctgggtgggtgctgccatcgcctcggggtggtacccgagtctggagtaggaacaatactctattgttacgttaaacctgaaatagacgccttcagatggagggggtgagtatgaatctattacgatctaataatgacaagagcactctgtgtcttttcagatgcttgacaatcacctgctaatcccgggggtctgggagctgagcattttcaacctccacccccacctctgctttgtggagttggggaaaaacagagacccaggagctgtgaaatgagggaggctcagcttctccacttactttcatggtgtgaggagacgcatgtgtatttgcctctgacccctcctgcagggaggaaagcgtacctggatctgggtgagaggcatgtgtggtgatgagaacatttcacagacccaagttcaaatctctgctctgccactcgagcatatttcagaacctgtcctagtctcaatttcttggtaaggtgagactataaccacttttaatgggtccacaaggcctgatccaacccagcaggtgctcttgcgggtgaggaccacatctcggttggttagacgtgtccccccagccctctgccaggacctaggagttggggtgaggggctgggttgcagggaaatgttgaatcccaaaagcagatttcccaggcaggcactgtcctgacccaacctgccgccagccacctgtcaagctggacctctgggcttttctctccaaatgctcttgttctcaggaaagggccaagactcaccccaggcacaagataagtaggaatcaggtgtgagccagtggtcaggagatttgggtctagactctgtgtggccagggtcattgctcaggttcgcagggctaaggaggagggaggcagggggagacatataatttctagaacttctgaggttctaggacaggggccagcaaactgtgacccttaggccagttctatttttacaaataaagttctttagttcttttggaacagagccatgcctattttttacatattgcctatggctgttttgctctccaatggcagaacagggtagtcttgacagagaccatgtggtctgcaaagacaaagcctctttatagaaaaagtctgggcagggcatggtggctggctgggtgcagtggctcaggcctgtaatcccagcactttgggaggctgaggtgggtggatcatgaggtcaggagatcgagaccatcctggctaacatggtgaaactctgtctctactaaaaatacaaaaaattagccgggcgtggtggcatgcacctgtagtcccagctactcaggaggctgaggcaggagaatcgcttgaacctgggaggcggaggttgcagtgagccgagatcgcaccaccgcactccagcctgggcgacagagcgagactcagtctcaaaaaaaaaaaaaaaaaaaaaaaagtcaaccagtccctccatcagatcacaggcatcttaagggcagagaacatatcctgtttgtggggccctagactcaacactggtcaggacacagttggcgctcaatagatattagctgaataaataagtggaaaacccatcaggcattgctggtgggaatgtaaactagtacagccactatggaaaaccatgtggaggtccattaaagaagtaaaagtagaactaccatttgatccagcaatcccactcctgggtatctacccagaggaaaataagtcattatatggaaaagatagttgcacacgcatatttatagcagcaaaatcatggaaccatcccaaatgcctgtcaatcaatgagtagataaagaaactgagatatatatatatatgatggaatactactcagccataaaaaggcatgaattaatggcatttgcagcgacctggatgagattggagactattactctaagtgaagtaactcaggaatggaaaaccaaacatcgtatgttctcactgatatgtgggagctgagatatgaggacacgaaggcataagaatgatacgatggacttcagggacttgtggggaagggtggggggtggtggggcataaaatagtaaggtgcagcgtatactgcttgggtgatgggtgcgccagaatctcacaaatcaccactaaagaacttactcataccacctgtaccccaataacttatgggaaaaatattttaaaaataataataaaaaaagaaaacccatcaggatgatttgggcttcaagaaataaggcttgattacaaatggtttaaacaatagcaaatgtttatcatcccacattagaagaagtctggagctaggtggccccaggacgagcttggcagctcagcagtgccatcaaggacccaggctcttcttatttttctccaccagcatcctcgacatattggcttggttctcgggcttgtcccttcatgtcacaaaatggctgcgacagttccaggcgtcacgtctagtcccatttagatgctcagctgaagaaggtacttttggaaaagaacctttcctaaagctccccagcagacaccctccatcagttctactagccagaaccagatcacatagcaaatgccctaactgcaaggtaggctggacaagtgaatatttggctttttctgactctgtagttgaggtggactctgtccacaggagtaaagggagaggaaccactggctggtgaacaggcactgttcaatgtctgccacaaagttctgctgcagatggaagaagagatgtttagttgtggctggggagggcaggcaggggtggcagaaaaggtttcttggaggaggtcctggaacaactggtcaaagtgaaggctgctgtggaggacgtcatggtgcatcattaattctggttgctggtaggaaatggttcccatggctgacagactctgatgagcgtctctcatggctttggcatattatggagtttttcctcctaaaatcagttttgcggccctcatagaacaacccttgaggggggttgtatatataatctttattttctagacaagtcaattaaagctgccagaagtgaggtgactcgtccacaagcagcacgttctgtggacagagcctaggactgactgagtccaagcgcagggccccacccccagtgctcttgtgcagaaagacatactggtcaccctgtgggcagccacctgacctgtgagaacttggattctgtcctggtatctggtggccacagctgaagctggcagctcccctcacaccaagataggagccttctgggagctggccagccaggagagcagcctcagtgaggagcttccaaagggatttggtgtcattaagggctccctccttcgggacactgcatggagactggaggaaggagtcgggagttgtatgggcccagaccctgccatggggttggtttggaaatagaagctaccagagagatctcattctttcttgggtgtaatttcaaagtcatggtgagaaaatgaaatgtgatgaagctgtagtgttggcctagaacaggatctggcatttagaaagtttggcgaatgttagtgcagttgttcccattatcactatcaccataattgtcatcaccacctctgttgtatgggagccctgacagcctgcagatgggtgaagagtctggcctccccactgtacagaggtcagatgtctctcccatcctccaccaggctgctctggcaaaggactttgctatggtttgaatgtccctgccaatactcagttaaaatgtgattgccattgcgatgatactatgaagtagaactggttaagaggtgattaggccatgagggctctgccattatgaatggattaatgttgtcaactcaggagcgggtttgttatgacaagaataggttgttataacaacctactcctgtttggccccctcttgctctcttgctcttgccccctcttgcccttctgccttccaccacagagtgatgtagcgcgaaggcccttgccagatgctgaagtcatgctcttggacttcccagcctccagaaccatgaaataaataaacctctgttgtttataaattacccagtctcaggtattctgttatagcaacacaaaacagactaagcagacttctgggttgaactcaatggaaacttcttgttctaaccttatgatctctgagcagcatttgaaattgactcactgtctttgcttgaaattcatttattgctggggctcaggaccctaccctcactgggacctcactttgtctttctagctatgtttcttcctgaaatattgacagccctggactcaggcctcagcattctgggggaagtgcctctactcagagttaacatttattgagcacttactgcatgcatgtgctatgctcagcactgtacatatcttgtttaatcctcatgatgcagctctctgaggtcagtactatttggtcatttattcactcattcaccaagatttttgggctcctactatatacaaggcacaattccaagtgcctaataaggcagatgtgttcctacctctggggagctgacacctagtgggaattattcaggttaacaggaaacagagtggagacctgaggcttcttacccagtcacagccctggtgggcagaggagccaactctagtgccgtgctcttgaatgctttgtttctggtcccaccgatggccgtgaatccctcacttccagtgcacatatctctcttgatgccattgactctgccagggtgttctcggcatctcaaacttagcattttcgataggttttattgctagtgttgtttttgttctctctgaatgtgctctgccttttcaccctgcatccacaaatggcctgggagcctgtctcaacaccccctcccttaatctccaaatcctgttatcaagagtggtcagatcagcttcttcagtgcacccccaggaccccattcttactcttcctgccatggttccagccccgcacttcctggacacccttcgttcttttcatgctctggcatgttcagctttgctttctcttcactgagcctttgcacatgctgttccctctgccaggaattccatttaccccccagccacatcccccactcctggccaacttcagcctttgctcaaacactgcctgccacagggcctccctgactctccctgcagactttccccatgctccctgcggtgtgcacattcaaccctccttgagtcacaccttttattaaagtaaaggctggcacatccacttcccaccaccctgggagacggggaccaggccctgtctcctctttcatcttcagtgccaagaatagcaggtattcattgaccagcagaatgaataaatgaatattggagtaggtttctgacagaggcctaggaggcttgaaattatctttcggccaggcgcagtggctcacctctgtaatccaagcactttgggaggccaaggcgggtggatcacctgaggtcaggagtttgagaccagcctggccaacatggcaaaaccccgtctctactaaaaatgcaaaaaattagccgggcggggtggcgggcacctgtaattccaggctgaggcaggaaaatcgcttaaacctgggaggcagaggttgcagtgagccgagatcacgccactgcactccagcctgggtgatggagcaagactccagctcaaaaaaaaaaaaaaagttatctttcataccaggagagacagtaaaatcctgggtttcctttgtggagccttaagttcatctaactcagtagtttccaaacttgcttaaatgtcttagaaacctgttgtgcctcactttagtggttctgggatgggggagttgtccctagggaatcctgcagggtcctgttgaaagagtttgagaactgcagctgtagtgcaaggcctcattttctgcaagaaggaagtgcagagaaggaatgggttgaaggtgcccttgaccatatagtgactgagcctggagtagcgtgctgggctcttggctccccctgcagtgtgtcacagactcttcatttaagcagatgtgtgtgtgtgtgtgtgtgtgtgtgtgtttaatacactttaagttctagggtacatgtgcacaacctgcaggtttgttacatatgtatacatgtgccatgttggtgtgctgcatccgttaactcgtcatttacattaggtatatctcctaatgctagccctcccccttccccaccccacgacaggccccggtgtgtgatgttccctaagcagatgttcttaaggggaagcagccttttcttcctggtgtactcagcttccctggcatcaagcattccctgcaaaaggcttggtggggatttttctttaaacttaaaatgttgttctccctaaagaaaaatgcgctgctgagtggaaaaatctgcatgtctcatgaccctgggtgccgctgtgccacaggtttttatgagttggcaaatatgtttttaaaatggagaggtgtgcaggaagtgagccagcaaggaaggagaatataagtcgtcttttttgcaggatgcaaaattgggtttatttgcagactgatgtgttaccttctaaaggactagccacaacgtttgaccctcaatctaaggtcaacactgctatccattgctcacagaccagagtgcatctcccatgaggcaaaagagcaggtgtgagaagtgggtaagcagtctgtatattgggggtgtggtggatggcataggggataactcagtctaatgaaagacatcaatgtgccattgggaaaggacagaggttgccccctctttcccccagatagtcgcccagcttataaatgcatagatctgggacagagaataaggttcacctaggttccccctaatcacaggcggaactaggactttgggagatgatctcacctgcctttcatttccaagagatcagtagcacttgtattttaagaggtgagtccttctatgaatatcttgaccttgaggtttacaaaggacttccagaccatggggtttgctttttatcaagtcgtactgtttacataaagaagtgcagaacctggctgggcacaatggctcatgcctgtaatcccagcactttgggaggccgaaggtggatcacttgaggtcaggagtttgagaccagcctggccaacatggtaaaaccccgtatcaactaaaatgcaaaaaaaacaaaaaacaaaaaaagctaggcatgatggcgggcgcctgtaatcccggctacttggaaggctgagtcaggagaatcgcttgaacccaggaggcagaggttgcagtgagccgagatcgtgccactgcactccaacctgagcaatagagggagactcagtcccaaaagaaaaaaaaaaaagtgcagaacccatagacatactgctggatggtttttcataaagtgatgaagtgcataccctgtggaaccctagtcaagaagcacgtcatctacaccccaggaccctccgggagccccttccaggccccatctaccttgtggtggttctaacgccatgggttagtcttgcctgcctctgaactctgggtgaaaggagccacgcagccttggcccttttgaggctggctcctttcactcaccattgtctttgagatttgggcctgtggctgtgtgcagttgtgtttggttcattctcgctgctgagtcctattcccctgtctccacacatagtgggtgttcacagcagccccacgaagtacacagggtgtggactgttcctcctgttttataagaaaggaagcccaggcttggtgttacccacagcacagaggtggctctagagcacgccccatccgatggctgctgaggaagtgacttgatctttctaggagcgtcttgtcctctgcccaagaagttgccagcagctttctctttagtcttccagaagcccctggctctccttttgagtcactttgaccacgcctccttaccagtcaaaccgtgggttttctgaattcctggaagtgctcttttagctgcttttctgatccctgaacagcaaacacttatcgtgggtagcattttcctctgccaggccaatggcagacattactaactaattgtgggactcctgttcattgagcctggaccctgtcttgagttccaggattcccggcagccactgccatctttttggagctcattcacttaatgaaatctttctgcttttgtagtgccaggtggtacaagcagagttgcactttctgctgaggagacttgatttcttatgaaaataccaagcaatgaaggaacgctgcatttctaaagcattcgttggcttcctggactttttcccttgcaggtggggtggcagggagtgggtgatggggcagtggctattctggacacagaaatccacattcctttaaggtgtcatttactgcttccagaatcccactttcaaggagacttgaagctagtaaaatgaataactgggcttcttcccagcctgtggaggcctcacagtggtagcttgttagcagagtcctcagaatatatccaggataaaaatgtgactttgtgcaagtccccagcttgaaacagggttacatcctgcttcctgggtgatgctacctggcagaggagcccaagggcagggggcaggctcctcgtatctgggtgtggtgccctgagctccttgccctgctgtttatttccagagcagaaccttggggctcactggagcagtgaccacctctaatcacaagagctggttgtactttttcttcgcaggctgcatagggtggaggatggggctggggcctctggagagtggcgattcctccctcagccccacatttctacctgctccccagggcaccttgttattacagttcaactggctggggtttgtcaggcctcaagccagcctacctggtggtttcaaaccagacttaatcaaaatgtaaatacttcttggggccagaaagcaggactgtccaggtgtttgatcagaggctgcagagcctgggaaccacaggagagggtgggggcctggcaggctccttccacacagaggcctggggttccctggggcctctctgtcaggggcttctggagcagcttctgtccccacgtgaccaacatcaccctctgccctactgctgtatatgcacgctgtcactggggcaaaggtagtgctggtgatgctggtgacagcacctgctccccttctccatccctgaaggaagacagcttagaggttgatggatcgaatatcttgcattttagagaggcgggacctcaaggctcagagagggtctgtgaccctcgtgaggttgcacagtgggcaggagcgcagagaggtgcactcgtggagggtgagccatgtgtccggtattgttctaggatcagcagtgaccagggcatatgcagagtctgccccgggggcaggatggtgaattgagagtaaaacgctagttggacgagatcatgttatatctgtaaacagacgatctatacatgtgtaaactaataacgtctgatagtgatgagtactctgtagtggatgaggtgtagcaggattagataagagaatgagatagattcagtggaggtggaggtgttaccttagatggggcctggggagcctccaagtgtgggtgtgtggaggtcatattagttgagacctagttgtcagaaaagggatggtcaggcaggggcacagccagcagggcgaaggctgtgcgatgagcatgagccgcaagggtctccatgggccgggaggagctcagagtgtctggagtggagtgtgggcctggggcatagtggttgtgggggagtcacgggaggcatttggacttgattctaaacctgttgggaagtcattagaggatttcaaatgagagaattccatgagttgctttgggtttgcataactctggctgctgggtggagatagtttgaaaggggcaagaacggaggtgggaggggaggaggctggtccaggtgaggatgctggcctggtccagtggcagccctggggccatagggagggggacaggtatggatttcactgcagagcccagacttggggatggatccagtgtggcatggaaggtgggggagggaaagtgaaggaccccagccgtcccttgggtttggggctcaactagggctcctttgatcactcatctcccactgcatggtgtccctacagccagactcagggtccttgcctaccctaaagcgccagggtggtgctggccctgcgtcttcaggatcatctggggagggctgactcacctgcctttctggatccagaaggcggagggtgtggtgttacctggtgctggggatgttggaaaactcagaacctgggctttatcttgactgtgtttaatgactcagcacaaatctagagacatgaccaagaggcagctttgagcagccctggctgaaggaccagagcagtgggatgatgtggcctgtggaggaaggaaacctccacctggaaccttgaggggaaagcagggcaacagcagtatgctaactgtgtgagctgctttttttttttttttttttttttttgacagggtcttgctctgttgcccaggctggagtgcagtggcatgatctcagctcactgcaacctccgcctcctagggttcaagcaattctccctgcctcagcctcctgagtagctgggattacaggcgtgtgccatcgcgcctggctaatttgctgctgtctgttgagtgctcactgcacatgggcttctgtgcatttccccgtcattcctcacaaccctaggcggcaacattgacattcttcttcccattttgtggatgcagaaactgaggctcaaagagcttttggcctaaggtcatccacctagcgagcagctgagctcacccacaggcccctgagtcccgatttagggagtctataaccagcacccaacactgtcgccagtgcaccacgctgcctgctcaccagccatccaccaagggctggctctgtgcctgtctctgtctaggggtagggcatgagaaccgaccccatgcagtccccacccagagatgcttgccctgtgcacgcagatgcggaccagcagggcatttgcagaaaggcagttgttcgcttaatgagaggtgtttgggcaactccctccttctgtccctccctcccttgctcttttcttcctccttttcttcccttccttcttccctacctgtttttctttcatctctcccttccctctctcctctcccaccccctcccttctcttctttccatctctccctgcagtttttcttttgctgacacctgtttctgaaaaatcttgggtgtctggctgtggggagctgcaggaaagcccagatgaggtctcctgagcttcaccttgtggttggcagcgaggacttgacctagagcctctgaccttccacctccctgggctctgagctccagagtcccgtggtcctccaaggctgtgggaacccgtggtcccctcccttgcctttcctctcttcgctgacagaacaaggggccggcagaggacatgtcaggtgtgtctcagagacctgggggaagatgggctcaacatgacctgcttctggggtgacacctctgctcactcacttattcaagcattcactcgttcacagacatgtcagaggtctgctgtgtgccaggcacatgtcctaggcactgatgagcaaaatggacgtggtctctgtcctcttgggtggaagccccataaaggcataagtgaaaatttgctgacaaattttgatagctgctttttcaaagccagacactgactgaggagtggtgggagagagctgtgtgggtatgacttggattgattgattggggatgatcagggaaggacaagaccctaagacctgaggacttggccgggtgaagtaggggcagcaataaagtgccactccccgggagacacgtgtaagtgcccagagcaacgtcatttgagaggtaaaaacctggaagacctaacctacgtgtctctcaacaggagagtggatggaggaattattttgacaaaacctgtgggtatgcaggtttaaagaaattttgttcccattctgtaagcttgaaatgtttcattgcaaaaaagtgattctggaaatgtgtatctagcagaggaaatgacatatgcaaaggccctgaggcagaaaataactcccagtgaggaagcaggtgacggcctgaccactgtacttccggtatctctgctctcagccacccctgagaccatggaaaggctccgtgttgagcccttggaaggcctccctgggagtcctgggtgtcagctggaggactgtgtgatggtgagggagttgaaccactggggcagtgcccgcctgggctggatttgggggaggggggagccttttggatgagtcagtcctctctggttggaaacagcagagtctagttgaggctctgccaaggacccgtggtgattcttgtcgccttttgtggagaaatttgcccgctaacaggccatctgtgtgaggtgagtcactgtttcccccgttttgttgattgcagacacctctgtgtgagtctgttcagcctgaactgcacacaccgataaacttcagtgcctggatgagcaagcttcctgtgtgcttcagcttggggcgcatgtgcgcttcttctaggattttctgaaacttggtcaggggctcctggatcatgattgcagattgagagccactgagccattccaggtcctgttttctgatgtgaaatggaagcccagagtggggatgtgtccaaacccacactgagatcacacagcgagggaaggaagccggggtcctggctgacacttgcggggcagagcaccttctcttggccccgaatatggattttggtgtccctagtcaagatttgttctgctgacttctcctggggaaagaggtgtcacgtctgcctgagcccctgagcctggtgggtggggtgtgaggatctggccggggccgctgcacctgcaggtgtttcctgcagacattctgctggggagcacttcccctcttctccctccaggtgactcactgggtgcagtgtcctctagcgtctactgggtgcagggcactggggagacatgggggatgcttctttgggctcgtctgtactaggtatggttatagggtactgggggttgcctaaaaaaatgctgtgtgaccttgatggctcactttttctccctgggcctctgtgtctccagccgtcagtgaggagcaggcgtgggtgatcagcaaggttcctctcagctctgatgtcattcattctgagttaggtggagagtaggggataattgcagcccttattcactgaactttcttaactatgctaaatgctttacgtgcatcagctcattgatgcctatatctatgtggttacagaggagccagttgaagcacagagaggttgagtaaatttcctggagtcacacagctagtaaattacatacctgggtttaaacccaggcagtctggccctggagcatgcagtcttaatcactgcatgattaaggctgaatcatggtcccctaaagatgtcgtatccgaatccctgcaacttgtgaatatgttacctacctgataaaagggccttttcagatgtgattaagttaaggctgttgagatggagaggttatccagggatatcaggtgggcctgattagagggagagtggactgtgcctgtgaaaaggagttcagagtgatgcagcttgagaaagacctgaccagcgactgctggttttgaaggtggaggaagggccatgaattgagccaaggaatagaggtggcctgtagattctcccctggagtctccagaaggcacactgccctgccgacacctggatttagcccggtgaatctgattccagacttctgacttctagaactgtaggataatacatttgtgtctatagcactccatttgtgccgttaataacttgttactgaagcaagaggaaactcatgcagccatgctctactctggtctcctggtggcgagccctcctttctgcatacacactggattttgaattctgaggggtaacaacctcatcttgccaacagagccctccttggccatttcacaattcaagaagcattttctaggaagccttttaaagccccactgccttgccccagcttgctctgttgtgtcacaggaatgaggtggggagaggacagagggaaagggtcatggggaacctggggccccagcctataccctgcctctatgaggctccatctgagcacccacctctccaggcatcgtccttggtcccctgggagtgggcacccatggcgggtctgcactgtatgcccagtgcgcctttgtaggccgaacctgcagggtcagagctgggtctaaggctgctccccaggtccttgcaggaacataagtgcccgggtttatctttgggcactagagctgtgcccacagcagctcctgttcagatctggatcagggtcaggcccccatcactgattgcgcaccccaggcacgcctcaccctgccccggcctcagcttcctgatctacaaaatgggtgtcatgctgcagccctgccgaaattgtgtgctcatggtagaagtgactgggaagaactctgcgtgtggcaagggctctcgctgctgcttcggtacagtcatctgtagggtcatctgtgacgtatgggccaggcgtgtgccccctcagaatcctctctgggtcccctgactcctccccaggagcagcccactccatggagcttcccttggccccaagtgcttgaagggaaaggtgaacacagtcgggatgacaaagttaggaggcgtgtgtttttcttcccggtgacgttgggccggtcagcccgcgtcttcgtagcttcaatggcttctcctgtgccacgcggtgggggagctttcttacgcctcgttctgaggattagagacaatggctgcacaggcactgtggctgccatgctcaggcctgccctcgctcctgacccccaggccagctgcttcctggttccagggggccaggaggaggatcttagtgttagcctgagatcctgggcaggtccagttctgaggcaggggagccctgtatggatttgggggaatgctggcaggatggcctgccggcccttttctccccacttcccagacggagctgaagggaaaggactcttccctgagggaggcagatcttcccagggcctgtctgggagctccctccagtgaggaggctggtgctgaggctgggagggctggtgcccagggcccgggctcttgagcctagatggaaactggggccaccttcggagttcttgccacatccctgcagggctggtgcgtgagggaccgtgtggtctctaagaagagagggttcagcccaagggtcacctccttcaggaagccttccctgattccacaggcagggttgattgtgcctcccctgtgccccctcagcccctcttcctctagtattgtcacctggcatgggtcagtgccgcccacgagcctgtgagctcttgtagggcaggggccacgtgccaagcaccaagtaggtcctcgatatgagtctgcacagtggatggaagaactctgggggaggcagagccgagctcagtaaggccttggtgggagggaagcatgctgggaatgcagggtccaatgggagtgttgagggaggttgaatcaaggacaaggaagggtcctttcaacccccaggtcctgtgaccctatgtgagatcaagagtcagggcagagtaatggcgacagctcacatttactgagtgctaaccacaatctcactttggccctagcagccttcttaagagggtggtgtttccccattttacgcttgaacaatctgaagctcagagagggtaagcagcttgcccagggtcacagagctatggacagagaccagatgtgaaccctcatctctgtgttggaatcctctctacaggtgcctctgtgctgtgctggtttttgcttctgtggcttcagactttgggggaacgttcttaggacccagctcttgcctgtcccttgagccagcatcatccttgtggactgggagttaagaactaggcattcttaggctcaaatcccagctcagcctctcagcagctgtgtgcccagacccctgtcctctctgggcttgtttcctcctctgcaaaacaaatctactttactgtagggtcatgaggcccagagactgtggaggtggagcatggaggccacagcctggttcgtcctagtgtctccgtggcgcaggcttcccagaccatgtgtgtacacggtcatgtccacatggtaattaatgtacctgagtgctgagcaggttttgattggccaggatctctacagcatttgtttagcttctttgaaataggggatgcaaaaattctggggagagcggaagtaattagtactcacaggaaaatgcaaatatttttatgagtatcctatgaaaaattgtatttttcctgagcaagtagtcctgtttatttctccaacagaattgccacagttgcagcagtggctgacctacgactgccaggagcatttctcaggtgtccacttatctcccttcccctggctttctcttccccttcaacccagagaaaacattatgaggcaaaagtgaccaaatttgggccttgctgagagaaggggattactcttgtagtgaaaagtccatttttgtggccagacttttctcaactgtgaaaaccagtgtgggcaaaaacatcgtgagcacaaaaatacattaaaaaattattttgcttggaaagaactttttttttccagttctgctacttcttgggaaaagacatttttaagaagatcaatagtgttgcaagaggactaggggtctgctttctcctaagagatgtagagggatagagggaaaaggagggaagccccaggcagggcggggttggggagttgggatacagagcaagagggcttaacatgggatgagtgcccacctcgtgcctcacacagtgcgagggcttcaagcacattttcgaatcgacccttataaagggcatttggttattaagccaattgggaaactgtggttcagagaggttggggaagtggcctgtggttattcagcttgtggacagaagagtcagcagcccagccctccccgtctgatgagaaccccttctctttccacactgccctagaagaagggactcttgatccagggctgggtcaacagacagagtgagatgggaagaggcacacccaggggaggggctgtgtgtaccttccgccttgctgggaaggtggttgtattccctttttcagagcagaaaatggaggctcagagattatggtgtgcagtgtggcttatttgttgttgtttctaagtccatttggaaatgatctcttcccttccggtcctgcctcgcccatctgtttatccatccatccattcatcagagattgatggagcttttgctatgtccaagcactgttctaggtgtctgagagacaggagggaaccaaacagggatacccactcacatgaagtctgcattccaacgggagatgagacagagcctggcaggaagcaatgagcagaataactcagaaggccacgcagaacgcttgctgcagggtgatgtgtgcctgggaattagaaattaacagtaaaagaaaggcagaggggtcctgagatgggggcagtgggtgggggcaggttgtagaattaaaaagggcgagtagaggcctagcttggtgacttacacctgtaatcccagcaatttgggaggccaaggcaggtggatcacttgagctcaggagtttgagatcagcctggcaacatggcaaaaccccatctctactaaaaatacaaaaattagctgggcgtggtggtgcacacctgtagtcccagctactcaggaggctgaggtgggagaattgcttgaacccagtgagtggaggttgcagtgaactgagattgctctaccactgcactccagcctgggtgacagagcaagactgtctccaaaaaaaaaaaagagtgagtagaggattttccttcctagtgacagaaatgttttaaatgttttggaattaaacggaggtggtggaagctcaacactgtgagtgtactgaatgctactgaattgttcatttttttttttttttttttgagacggagtctcactctgtcgcccaggctggagtagagtggcgcgatctcagctccactgcaagctccacctcccgggttcacgccattctcctgcctcagcctcctgagtagctgggactacatccacccgctgctaatttttgtttttgtatttttagtagagatggggtttcaccgtgttagccaggatggtctcgatctcctgacctcgtgtggtgatccgcccgcctcggcctcccaaagtgctgggattacaggcgtgagcctctgcagccagcctaaattattcactttaaaatggttaatattcagtgaatttcatttcaataaatgattattttttaatggcgatcagggtcagcctcatggagaacgtgagagctgtgcaaaagctgcaaggaggccaaacctgttaacccaaggctgttttctcccaaggagcaggaggagggttccaggcagagggagcagctggagcagccagagcagcgagaatgagaccagctgcacctcgagagcccaatccggccactgcctgtttttgtaaatgaagttttatgggaatacagccatgctcatttgtctacatactgtctctgtgacccagagaccctatctggccctttgcagaaaaaatcctcaggcaggaacatgcctggggtgtttgaggagaagagtgtggctggaatggagtgagtagaggtgagagtgggaggaggtgaagtcagggaggcagtaggggccgaatcatggtgcccctgtgagacttcctgcttcctgtggcacccctggcaatgtcgggacagacgctggcatcatgctgatgtggaagctctgggagtatgtgtgtgtatgtagggcatagtagggtagagacatagctgaacttagagtcagatgtcagaggacctagtcttgagacctgctgtttgtcccttgccagctctgtgtcctcagttctctcacccacagagcctgatagtagtggtgatggtggtagtgatggtggtaatggtggtgctggtggctgtggtgatggtgatgctgatggtggtggtaatggtggtcgtgacggtgatggtagtggtaatggcagtggtgatggtggtggtggtaatgatgatggtggtggtgatggtggtggtggtggtgatggtggtgatggtaatgatggtagtggtgatggtgatgatggtaatgatggtagtggtgatggtggtggtaatggtagtggtggtggtgatggtgatgatgatggtggtggtaatggtagtggtggtggtgacggtagtgatgatggtggtggtaatggtggtggtgatggtggtggtaatagtggtgatggggatggtggtaatggtggtggtgatgatggtggtggcaatggcagtggtggtggtgatggggagggtggtggtgatgatggtggtaatgagtggtggtggcaatggctacatttagtggcacctatgaggtgctaggtattttgcatatggtgctaatccttaacagagcaatgccaggtgggtagcagtgtctcagtttgcaggagaaaacacggagggacttaaccaaggccacacaggtggtatgtagcaaggcttagatagcagtgcagtgacacccgcttacattgcagtgaagatgtcatgaggcagtggacggttgtgtcctggtgaacagtgcagctgtcagggaggggaggtagcctttgtgggggaggtggcctggtgtcagcaccaccctccctggaagggtttcctgggagggactgtccccagcctctccacctcccctgggtcacaccagagtgctcctctctctcaggccccatgtgctgggaggggccctgtccccatccccatggcgaccagttacccagcctggtgttggttttggttttcctcatttgaggttgtgggatccctctggttgaggctgaggtttttctgctttggaaaccccaactgtgttgtggccgtgaggaggggcctggaggtgctggcacctgcccacagaccgcaggccccagatgccccgggccgccccacgcgcctcacaccatccagccaagacatttcagacactcatagctgagaactgtggcacagggaactttctggggtcaggagaactgtgtctttgctccccagttccgctcctgtagaggacagagccactgggagggctggggtgtatgatgccccggttcgcatctaccccgtggcttttgcccccactttgggtggaatccttgagcatagcaagcccctgactgagcggcaggcggccagcaggcccagaaagggttccagcccctctcgccgcctcctggcctgacagttctggcagctgctccctggcctggctgtgcccacatcagagtgtcagccctttgaatggaacctggggctggatcctgcacaactcggcccattccttaggtctctgaagtggttctcctcatgtgaaaagagccagtccccaccaagtggtgaagctggtggtgccagccgcggaatgcacccttggacagggagaggctctgtgccccccagaccaccccacttccctctcttgcctgccacctggggtcctatgctcagctaggaaagtgcgggatacactcaaaggcagcaggaccatggcgcctaaaagctcctgatgcttcctgccccagggaacagtggacccatgccatccagaggcactgcacaagccccatctcgagagattctgggtcacaggtattttggcagcccttcatgttttcttctaaacctctcaatctggggatagttactgggagcagtctcctcctgacgccactagaccttgacctcgcagctccagcactctggggcagcgtagtaatggaggaaccgagggcaggatgaggactgaggctggattccccatgattctggagattgtgcagaaaggctgtgtagagaaggtgcaccgagtcagggacccaggcaggggctggctgttctcagaaggtgagagccatagagacagaacgagacccttggcctgtatctgccccactccatcccttccctgccttgcccactcagtgggctccccatcgtctgtctcacttatggggatcttcaagaaaactcttgacagaagcggctctgcgccctgtcctggtgtaaccctcctggatctcaggtgaagaaactgaggccagaggggtggtgctttctcctacccccgccccataccaggggcctgtctccctttcacagtggttgccaagtgcatcgggttggagaaagtaccctacaggctgaggtcacctcaatacacttggctggagtcatgttgcttctgaaaaggcttgagtcactcggtgacgcagcccctgatcaggcctgtaattgggatctcgccttgttcgggcctggatgaaaagagacttagaatcagtgagaagccacatgcccacctcatcagtttcagctggaggtgcctctctgggggtggcaaaggtggcagagccctggtggatggaaaataagcatcagtggaggggagggaggaacaggaggcagtagacacaggggtaacccattctcatcagaacagctggccgcctccactttgcccaggccagatctgactctgagaacacccacagcctccccacggtgatattttctggaaatccagccctgctggcagcacagtgggagctgagtcctgaaagcccacctgggtagaaaagaactggatggagtctttagtcctgcagacatcacaggcagaattgtgacactgccttccactctgcagatgagtcatcggccttttgtggctgggaacgcggtagagtgatccttccacatgcagtcactgcgacacctgagaccctcccagactgattcagttgcgttgagagcagcttctccggttttcagggctttccttcctccccctccaaattcatagtcgaaagaccccgcttcatgacatagtttgggtttctaacaaatgtggtcccctgcattagcataatgctgacttttctgaaccacaagccagtttctgctgggaagtcctggggtctctgtaacctgtgcccctcgctaccccatgtccttgtgcctttaaccagcagtgcccccagactattctggaaatgggggtgatagtttctgtggccccattcctgctacgtctggttgtgcctggccccaacccaggggcttctgctctgagctgagagctgggctggccatgccatgtcaccctgccctctccatacaaggaccagacccactgaattgtttcaaactctagagtcacctgtgacatgtggcctggagagaaaagatgagttggccaatcagatttgctccttgagcctttggaatcaggattctgggagatgggtagtgagctgggctgaagggtgctgaaggttcctgaagacatagcagcctcaacagctgcaacacagttctaactacccaggattagtgcagacatcacaaatgaagagcacagtcttcacaagaccaccctcactccaggcacctgccacaagggtgggggtccccaggccactggcacttctgaccacggcaacagattcagggattcccctgaagctctcaggttggataattcgctagactccctcgcagaacccagtgcagcgctacactgacaattacagttctattgttgcaaaaagatacccaaacccttgacagggagaggtgcccagggcaaggcctgagagtcccagatgtgaagctgccatggatgtgccacctcctggcacattggtgtgtgattaccaggaagctcacccaggcctcagtgtctggagtttttactggagcatcatgattttggcatgattgatggaatcactgggcacatggtcgaacccagtgtctggccccccgtccctccctggaagtcagggtgataccacgtggcccaaagcctcaaccttctaatcccatggctggtctctctgacatgcccagcccccctcatgagtcatcttgttagcgtaaactcagatatggcttcaggggcctaccatgaatgaaaaagacactcctattactcagaaaattccaaggacttagagactacctctcaggaaccagggacaaaagccagtcagattctttattatacagtgacaagttggggcctatgcaaagacgtgagagtgtcctgatctgtggagatgccaggagtctgccccagaggagtgtggcccatgggaaaacaggcccccacttattcagggtccagaaagcacggcaggtccactgcggatcctgccttcccatccccagggatgactctcttttctctgggatctgtaaacaataaaggtccaagggtcaccagaaggcaaagaggcattcagtagatgggtgtgtgtgtgtgtgtgtgtgtgtgtgtgtgtgtgtgcccaaaataggtgtgaggcttgaggtgacttctgcccaacttcacagggagatgatcagggcctgggggagagttggggggaagcggcccctgaggctgtctcattggcccggacccctcaaggccgcagctgagcagtgctctccctgcagtctcccttaggctttccggtataggaggggcctcatacggtttgccctgcccctgtgagtggccctattaatggctttaagcctgccaggcatcctgctgtgagaagaatgcctgactcaagtcaggcaggacgcagcgaccttgtcagagtcagagcccaggatcaccagattctggagctgggaggaatatttttcagtcaacttttccaagcgtgtgtgtgtctcttcaggtcctttttagaagacgtagacagggcagaaataacaagtcagagaggaagaaattcctagaaagagtggtcccgtcattccttttctcactgatttccaggcactttctcttgacttacagcagtggttctcaaagtgagagtgcatcagaatcacctgcagagctcattaagttactgatgctggcccatccccagagtgtctgattctgtaggtccagggtggggcccaggaagctgcatttctaactggctcccagcgatgctgatgctgctggtccaaggaccaccgagaaccactgacttaagggcaagaaggaagctccttccaacaaatgcatggaaccttcctcagtttcccccgtggaacctttctctgatcgattgcacatttgtcaccagggaggaaaagaacattagactaagagtcagaacagcagagccctggttcaggttatgatacacactccctgattgaggcaaggttctttcctttctgggactctatttctgaatctgtcaaacgggttcaatactaggacctacgtcacgggggtgatgtgaggattgaactagatgacatgttactggtgcaaattccctgactctgagggtacagcaaaggccatataagcagtccagggtcagttgttttgcacaggtctatcccatccctcccaaggatggtatgtgaacctgttgggcttaaaggaacccagtaagttagaccttagaccgtccacatcaccagtattgcgggctttgtcagtgtcctttggaggagggggctgggctggcagttccactccactgtgccaggtgatcacagggctctgggggctgtaggccgctcactgctcagaatccatcatcgctgcaccccagccgcatcccactgggctgacactgccacagggacaatgccttcctggagctcaggtcgtcccactgccctccccacaagcactgcacctcccccatcctcagcttctcccttctgttctccacaccggttcatttcagcccctgccttgaaaacacaaacaccactctcagaaacagcaaaggcaacaagaataacagcaagccagtttcttcccccaccaagacagcctcttctcccatggcagttttttgggtggaatgataccgttattcttccctgggttagccacaggagcaaaagaaacgctttagtctctcagtagctcactgtgacaagtgcttggcccgtgcttaagaatcagtggctttttattattacttggcttctgccttccatcaggcactcctttccctgataggacatgccctcctcctgcggggcccccaccctcctttgttggccactctccttcctcctgccctgccttccccttaacatacttccccagtctggcaggagggcacctgctggaggacatcgctggcagctggcagccgagggggcccccagggctggagaaagcaggagtgagagtgggattggacaagcaatgccctccctagagtctgtcccttctaaagggccagtggcagcccgagccatgaatcaggggacacgccatcttgctgttgtccgcctttctccaggttttgtcttggactccttccgatccgaggccaccttggtcctctggtgccttccccagagcgggagcccccctgatcggccctgggcctcggtcactgccattttcccttgcctggcggggcaacccttctccatgcaacctctcctacctgcctggctacaaccccagctgtcttgctcatctttgctctttgatgcatggaatgagctggatgaggtcagggaccatgtcctcttccctgactcattacgggtacctggaaggtaaaccctgaacagcagaggatcctttgggaaagcaaataaagccggaggctcctcgggacaggaaatagcggtgagccagtgccagcagaagattgtgctcccgcctgggtgtgtggcttattccctggctccattaattcctctccctgagcctcagctttctcatctgtgaatagggtcagtacctcctgaatgagggccaaatgtacagtgcccaggtcagtgctcagcccagaaggctggcagggagggaggttgtcatttattcctgcaagcattcatgcctttacccagtcagccaagtaacttaatggaagcttgcaattaaacaagaattagctgcacccgcctccttcccgggagcaggtctgacctgagctgggagaggatgtgatccagacagggggctctgccttttcagggcagcatgagaagggacactagagctggagcttgaagaacaagcattcctggcagagaaagccatgcctgtagggtcggagtgggggaacaatgatgtatacagggattggaggggctgccaggtggccaggtggctggatgtaaagcatgacacttgcattcactcagcagatactgtttgggcttctacagtggaccaagaagaaggtgacagagaacaaagaaacccaggtccctgacaccacgggtccgctatcagcacaggggagactgatgacgggcaaggaaacaaataagtgggaagatttcaggtggtgatgagagctgtgggctgggtctgggagtccagcagtcacttggcacgtagaggttgaatgagtccatgaaaatgtgctgcatgcgttgagagaatggatctgtaagctgatgtgcagttcaacacagagacagacagactgaccgaccagtgcttcctacacacttccatggcacgtggagaatgggcctgcttcacaaccgagctcagaggagacctccaggaaggtagaattcaggctaagactggaagtgtgggtgagaaacattcggaaaggtaggaagaaggtgctcctggcagaatgaacagtgagtgtaaaggccctgagagcagaggcagggagggaaataaagcttaggaagacagtcaccgaggccctgaatgggaccaaggagaacgggctgagcctatgggtggtcaggcctgggaactggccattcctgctgctgggacctgagcacgggggaggtgggaggtgatggccccagccccttgtaggcctaacacccctccccagcagtgaggtgggcctagggcagcgggggccgtagggccaggtcacaggaggaatttttacagtggcatggctgggccctgccccctctcaggatacagagaaacaatcaagtcctatgaaataataaacagtgccaatacttcagttatcaaatatgcagcttcacaaccccgcagcagcttgagagccaaacatttgtctagacgtggtgccttctctgaggcaggttttgtttgttgttaagaagtgaaaccttctcccagcccatctgagtcaggaaggttgggtttatttcatggcacttttagaggaactggaagccagatatggggtgagaggccattctggggtctgctgtcatttagggggatcccctgctgagaacatcctcgtattagcttcctgttgctgctgtaacagattgccacaagctaagtggattaaaacaccacacatttagtatcttaccgttctggagatcggaagtctgacgcactctcagtgagttaaagtcaaggcatcagcagggctgtgttccctctgggggctccggggagaatccttcctggcctgcatgccttggctcgtggccccttcccatcttccaagccagccaatggctggtgagtcttcgtcacattgcatcactctgacactggttgctctttctccctcttccacattttaggaccctgttggtgacagtgggcccacctggataatccaggattatgtccctatcattatccataatctcatccacaaacttaatgctcatttgtcatggaacctaacgtattcacaggttctagggattagggcatccctgagggcgttatcctgcccaccacagtccccctgccctattctggaagctgaggaaatagggttgaggaggaaagtgagcccaggccgtagctggagagtctgcaccctcggcttggggctgcctccaagtggcttacctttcccaccgcctccaaccccaccacagctgccccatcactaacagatctcccccaacccctgttcttttcctaaatgttggtaaaatggtcattaagtaaagcagcattttttccacatccctacccttgacttactttttcttttgagatggggtcttgctctgcacccaggctagagtgcagtggcatgatcatagctcactgcagccttgaacttctgggcccaagcaatcctcctgtgcgccaccacgcccagctacttattttatttttatttttaatagagacggagtcttgctatgttgcctaagctggtctaaactcctgggctcaagcaatccccccatcttggcctcccaaagtgctgggattacaggcatgagccaccacatcttgtcccaacccttgacattttagagccaaccatgctttgttccaggggtctgtcctgtgcacagcgcaatatttaaccacatccttggcctgcacccactagctgccagtagcacctctccacccagtggtgacaattaaaaatgtctccagacattgccaaatgttccctgggaggccgtcgctggggttgggaaccactgaggtaacgcgttggatgtgtctgtcttccctgctagcgacactgtgtccggcacctgcagagggcctgccgcttagtatgtgctcaacacatattggttgaacgaatcagtgaacctatgttaactttcttaatgaataaatctataagtgtgcatgtataaaatagactcctgggttccatagactggctgcctgagagtcacctggggatccttttaagaagtcacattcctggggtccaatcacagaggattggggtacagcctagcaatctgtattgtcaagagtgcttcatcagttcccccaaaacttaaacatatataccatataatccagcaatttccctcctgagtatatacccaaaagaatggaaagcagggacttgaacagatacttgtttgcaaatatccatagcagcgttatacgtaatagctaaaaggtagaaacagcccatgtgtctatccacaaatgaatgataaacaaaaagttgtatacccatacaacagaatattattcagccttcaaaacaaatgaagttctgacacatgctccaacatgggcgaagctcgaggacattacgctaagtgaaagaacagacacaaaagaacatgtatgattcccttatacgaggtatctagagtagtcacaatcacagacatggagtgtaggagagaggttgccgggagctaggaggaaggagggaatgggagttaatgtttaatgggttcagagtttcagtttgggatgatgaaagagtcctggagatggaaggtggtgatggttccacagcaatgggaacgtccttaatgcagctgactcgttcacctaaataatggttaaactggtacattttatgttatgcatattttgccatatgcaaaaaatggtgcttcatgcctgccaggtctgagaatcagtagtgtgcgagaggaatggggagcaggggatggacccgtcgagttctaacgaccctcccaggccttgcagctgctgggatggggacatcagactctgctgagctagggtttaggctgatttcttgagagggtggccctatctgggcgtgcacagaagaacctctaggctgcctgaatgagggctgcggctagatgaggattggcttgtctggaggccacatgtgctgtcccccgggcagctgctgcccagctccggctgattcttgccatgtggggtgcctggctgtgggagagacgtccaaggtctggatttcgatgtgaaatctcctcatttttatttatttcaatagttttgggggaacaggtggtgtttggttgcatggaatgttctttagtggtgatttctgagattttggtgcacacgtcatctgagcgaggtacactgtagctagtgtgtagtcttttatccctcacctccctcctccccttcccccaagtcccctgagtccattatatcattcttgtgcctttgtgtcctcatctgagctcctgggaatctcctaatttttcaatgttggcaactggttcagtgaacaagcaagcagacaaacaagccacctaagggtcacactggtgaccctgcgggcctccggtctggcttgcagcttttctgggagctcacaggctgggtccccagctagatccttgctcctgctcccgtcatggctgccgcgtcactcctgaagtctgacaccagctttctctttgatcctctgagaatttctcttgtattcagggcacccaaaatggtggtttacagagagaatagcaagagccagggcccagggtctggattctgctcaggctggggtcttggctctgccaattatgagccacggggccacaggtgacttgctacctttcccccatgccttgatttcctcatctgtcaactgggtatatcatagttcctgccggccaggtgcagtggctcatgcctgtaatcccagcactttgggaggccaaggcaggcggatcacttgaggtcaggagtttgagaccggcctggccaacatggtgaaaccctgtctctactgaaaatatgaaaaattagccgggtgcggtggtgcacatctgtattcccagctactcgggaggctgaggcaggaggatcgcttgaacccgggagaggcagaggttgcagtgaaccgagatcgtgccattgcactccatcctgggtgacagagtgagactctgtctcaaaaaaagaaaaaaaaaagttcctgccttgtagagtaagggtgaagcctgcaggtgaggggcttggccccgggcagggccagtgcatggctgagcagtatgcgcgtgtatgtttatatgtacatgaaatgtgtgtgcacttgtgtgtgtggcccccgttggcagaaagagtgagcgtggcatgggtgatttcttcctcaaagagtcattctgaggattaaacaagataatgtacaggtggagcctcaccacggcaggtgccgcctcaccacggcaggtgcccaatacgcattccttctgtccctcggagtgtgaggccttggccgtctgtggagatttgagaggaggacactgggctagttggagaggagggagttgggttgaagatgcaatgagaggagaggagagagactcctccccatcagcactctctcctgcttcctggagcaggagcagagttctggtcccattctcagaggcaggtgcactggctaatcagggctatgaccttgctttccaggatagcttggatgacagttaagaatccccagttctgtgcctacttttaaacacatgctaccttgttttccctcctttcagctttgggaggaaggccttactgtctccacttcatggatgaggactcagagagggcgggtgcttgtccaggcttgcctaggcagcaggggatggccacagggccagagcaaggtggaggacaggttgggctggctgggagagggctggagctgagtgccactgggctcccctgggttgctggtgtgcagaaggggccttgtcctgcccagctggttcctgggagggtgacagagtggaggggctgcatacccacccggagcaagcagacgagctacataaaatcctgataaccaaggggcacaaagggctccatgacctgtggtgagtcatggacagatggtggctaagcgccactgtaagggtggagagtgggtgacggcaccttggtccccaggagccctctggccacatggcacagcagtgccttcaggtccaaggcccagatgctggtgggctcagggacactgaggcccagagcttcaccccatcgctgtttgcgcctgtgcaccctgacacctgtccatcatcccttggaccaggagtgcaaggatgacgggaacacctgtgtgcgcctcatgtggttctgcacgttacacgtgactgttcattacatgtgttcattactagtgcacattcattgtgcgtgtgcatgttcatcatgtccacgtgctcagtactcgtgtgcactggggaggatgtgaggcagggcgggcccctcaggagtccctccttccttccagcctcggagactctggggtttgtgaggagcaagaagaaggcggtacttgacaagtggaaactgaagttcttgtcccccaacatctagcctccagctggggaaggagactctccacagaaagcaagaggacaaaacgagggccatgaggggccatgggcacctgcctgtgcctctgccccacagggatgccccaagctaaaggggatgttcagacgtggcaggcctggcccctgctgtgggaaggctgtggtctagtctaggggaacagccgtgggggatgcctggtgtgggtggggtgcaggggagccctaggcctcactgctagggggccggggtcaggcaggactgtgcgggatactggggctcacagcccacctgggaggaagagtgtgtgtgtttgtgtgtgtcttgggctgggggtgtgtcactggcttggcctacagcccgtccctctgtctctcagcccaggaggctggtgggcaggctcactgcggggacgccgcaggctctggagcctcagccaggcatctttttccccatctctgcagggggcggaggaaagcgcaaagggaaaagcaagaagtggaaagaaatcctgaagttccctcacattagccagtgtgaagacctccgaaggaccataggtaagctgtcctgcctgggggctgtgcggggagtgagtagcaggtgatccgccaagccgtttgtgcattaaggcaaatgggtgagccgccaagctgtctgtgcagtgaggcaaatgccaatcagtggacacagtattgtgcttccaggtaggggctccaggctgacctttttgctaatcaacataaacaggcaaccagtattcattgaatatatggcatgtgccgggcagagtgacctcctcccagttatcctttgaggcaggtgctattatttaatatttcacttcacctttcagatggggaaactgaggcacagagtggttctgtaacggcccaaagtcacacagctgatgggagggtggtggaggtgggccaggcccaacacagagccaccgctcataacttctcccctttcttcctggagcctgtgggtcctgccctcagggggcagcccaggctttgggagctgagagtcaggtggggtgggggatgtggggtgaggtgggggaggtagggctcccctttccacttgctggggatgtcagtgctcctgaggagccactgggctcagtggcacagcttagccccctgtatccagcacacacacaccaggcacctccaagagcagccaaccaagtgggtctgtgcctggtcccacgcaggacacggctgtggtgaggaggcctgggtgcctgggcgagagcgcccaggggacaggcatgatgtgaggccccactccagagtgtttggggtcccggcccttctcccctctgtgccctggggtgggtccttccccatcactgcctgagggctccccatccgcttattattgtcagaggtcatggacgtgctgaacacgtttaagaagactcaagtccactgaaggctgggcacggggtggtgctgcccagaactccataggcccagcttttctggggacttctgcccagggcctcgggtgagctgccccgtgcctgccctggaattcaaggccacatgtagccatttattcagcttttctaaatggcctcttcacggtctgtccccaccagtttccagggccggggggacttacctgccacccccaggcttgctccgtcctggccctgggccactcagtccacactccatgtttataggtgataggaggccatctgtgccccgccccacgacggcagacatgagcaggtgaagcaaggtgggatcctgaagggtcaggaaacgtccttaagacccaccttccatccctaaaatcccaggcacatcagaatccccatggtgttctcgggccgagaatgctgctggcctgagggattgggggctctgggtccaggcagacatgggttcagatcctgccctctctgctggccacatgacaagttactttatcctgctgagcctgtttccccagctgtaacactgtctgtgaacccagtcatagggtggtggagtgggtgagatgagaccatgtgtgtaaagggcttagctggtgccctcgtcgggagaccaggggcccatgcccctctgcacactggcgtgctttccggagttcccacagacaccacggtgccgtggatgccgtgtgcacccttgatgatcagcttttctgctggaggcagtcgaggtcgggtggaagagaagaggggctgtgttcctggggctgtagcttactggggaggatttgaccactgagactttgcagggggccttcagagaggggagccagggagaacccctctggtgactagccatttcctcatgggggaccattttgttcttcatgctaattttggctcagagagaatagggcctgttgtgggactggggaggagaccttagttgccatggttgcaactcacccatgtgtgcccagcaagtaccccctttctggtgagccaagccttctctgtcattttcatcctgggtctgctggctgccagaaagccattcctggatgctgagcccagcttctcccaaaagagggatgttacctcacaacccattcactgtggccccagggaacgtcttgcactcatccacagggccacagggctgctcggagagacctttctggggtgttgagttggaggtgagagcttacaacaggaggaaagcatctccaaggggagcaatgtgagaagcgggcacctgcgcacagccacgctcacctggcagggcggtgcttcccggccctggctaaactgtctgcaggtggtgatgccaggagtgctatggggcacagccagatgtgaaggccacttcctcagagaagcctcttttgactcctgaatttaaatgagctccagaccagagtctctcagagcacctgtcctcttctgccagagcacccttcctcagggctctttggggaggaactggattgttaaaattcaccactgcgtagttggtgcctgcctcacaggaggggcacaatagatgttagttggatgaacgagggaaggaaagaataaatgaggtgtaagtgaccactcaacttatgaagtgtttctaataaatagaagaagagcattgagagccagatactgagcattcatgtatctgccatccagatgagagaaatcttaacattttgctatattttattcatgtgtttctcaaaaatataaaagatgaaaatatgaaatataggatttatggttccagacaagagggagtagatgcggtgtttcctgtccttcccgctaaggacagtcaaaaaccctggacattatgtataaaacaaacataagattttgaaagccgggagagaagaaggcagactggctggggacctcgagccatgagggacgacacagcagtgagcttcctgggtttcttttttatatcccagagtggatactagacaaacttgcaacccacaatgccagtgggtgcagactaaaaagctccttccctcaagaccagcctgaccaacatggagaagccccatctctactagaaatacaaaattagctgggcgtggtggcgcatgcctgtaatcccagctactcgggaggctgaggcaggagaatcacttgaacctgggaggcagaggttgcagtgagccaagattgcgccattgcactgcagcttggggaactagagtgaaactctgtctcaaaaaacaaaaacaaaaacaaaaaaaacctccttccccctgcagaaaagcttttgctggcatagctggttactgtagaactgtcccgtttctgctatggttcacacgccagcaacgcagacacctactttttttttttttttttttttttgagatggagtcttgctctgttgctcaggctggagtgcagtggcgtgatcttggctcactgtaacctctgcctcctgggttcaagcaattcttgtgcctcagactcccaagtagctgggattacaggtacctgccatcacgcccagctaatttttgtatttttagtagagacagggttttgccatgttggccaggctggtttcaaactcctggcctcaagtgatcagcccatcttggtctctcaaagtgttgggattacaggtgtgagccactgcgccgcctttttctccttcatgtaacctatgtcttagcatgggctgctttaacaaatacccacagactaggtggcttaaacaacagacatttatctctcattgttctggaggtggggaagtccaagatgaaaatgccagcagatctgatgtcctcatcagtttttcctggtttacagttggctgtcttcttgtatccttgcatggtggggcgggggagggagggagggagagagagagagagagagagagagagagagctcttgtctctttttataagagcactaatcctattcatgatggttccaccctcatgaccaaatcacctcccaaaggcgttacctccaaataacgtcacgctgggggttaggtttcaacatgtgtgttgcagggaggatgcggacattcagtccatagtctaggactaggttcagtgccaacctattcctagattcaaagagccagtgcaccctggctttccacctctcccctgagacacagcttctcatactttgagattaactagccctgccaaggcctggtgtccctcccagccccctcctcccaaattaagactcttagatctaggatgggtgtgatggctcatgcctgtaatcccagcactttgggaggctgaagcaggcagattacctgaagtcaggagttagagaccagcctggccaacacggggaaaccctacctctactaaaaacacaaaaattagccaggcatggtggtgggtgcctgtaatcccagctactcaggaggctgaggcaggaaaatcgcttcaacttgggaggcggaggttgatttcctcactctaggcctcctccccataagcttccaggcattgccctgggagcacctgagtgtccctcagcttccagtctgcctggccccacctcattcacttccactgtgggggacctgggagcacaggatttggctctgagcttttttctgtccatggaccacccccccgccgcgaccatgggccccagccctgtctgtccttctaggtccataaactggcctcttggcagggcccactcccctgggatggtgtgaggaacgtgcgtgctggcgtgtggaaatggattcttctgttctgccggagggtattgaaaaggctctgtgtgtgagtgccgtgggagagaggcccgggaagggcaggaaggctgacgtgagccgtggggctgcagctcgtggccacggggccagggtctgggccttcccactgtttacagtccgtcgctgaggtgtttgcccagtctctgctggggtcctgctggaaggctttttaaaataaaattctcatttctttcctagaccaatacacaaaccaaacagtggccaataccgcatttatttttcttgtggacacatgagctcactttctgaagttctttgggaggatgtcctgggacaggctttgtgccaaggggacagggcccctttagggtgtgaggtggtgccatgagaaggctcttgatcagagctgagggcagaacccatgaggaccccaggatgccgccatgtctggatggccccgaacggtggtctgttaaagccctggccttctgccttcagccctgccctggacagtcatagaccatctctacctagcagccagggtgatttttgaaaaatgaaaactggaccctgtgaaatcattctcctgctgaaaccaacccaacagctctccattccactcagtaaaacccagactccttactgtggcttgtaagcactttgccctaaggtgaagcctgtagaccccttatcagaagaatgcttttatagataaaatagaatacatagggttacagaggaaactgatcctttttaaatatacttactacatacttctaaaatttatgatacagaaatatatgtgcttctttgttaatactttataaggtctaactgtgggtctaatagctattgtaattttgatttttttttttttttttgcctcagagtttgactctgtcgctcaggctagagtgcagtggcgtgatcttggttcagtgcaacctctgcttcctgggctcaagctatcctcccacctcagcctcctgagtagctgggactacaaacgtgcactaccatgcccagctaatttttgtattttttgtagagacgggattttgccatgttgcccaggctggtctcaaactcctgagctcaagtgatcctccctcctcagcctcctgaaatgctgggattacaggcgtgagccactgcacccggccagctattgtaattttgaacttgtcatgaacctgagtgagcttttcagatatctgcaacaactgataggaatggatctttgatttctgccggtgacaagtccccggcactgctgacatcattgtaggttgttgtctacattcataattgaaggaagtgcaaattttcagttagaggttggtgaaaagaaagatgacatttttctccaccccagtccatggactctctaaatcctatccatggtccttttggcagtgccctgcctgtgctgccctatgtgagctggccctcaccttcatcttggatccttccctcctcctccattcacaagctggtctcccttttgtcctttgaataacacacgcttgtctccagcccagagcctttgcacctgttctctctacccggaatgttcttcctcacactttttcttccaggggactttaaggtctcagtccaaatatcatctccatagagaagccttctaaaaaggaaccataccctccttctaattgcatcctttcccatagtgctgtttatttaatgttcttacccataactccgtctgaagccatcttttcgtttacttgtgtattttctgtctcccacactgtactagatgttctatgttaattgcaactgtgtcttgcctgtttcactatgagaacagtgtctggcacataataggggttcattaatactgggtgaatgaaggaatgaatgaggtgaaatatttgaaattagagctcttctaaaaaaattggtgacatgtgtttgctgtacccatttaaccttagccagtagtttacacttaaagtaattaaagtctggccttaggaggcactgtaggtagcatctgctgtaacccacccctccccctgcccaccatcctcaccatctggatgaggcagctcagcatggtacatgactcagccacagtctcacagccactaagtggggaggggaagctggtggctcctggggcaggttggtttcctctgaagctgtagtcggagtcatgatcacagtgatgtcaggttttcacagaatccttagctcaggggactggagagcatcttgtccaccacccattggtggtggagtaaacaggcttcaaggggagagtgacccgcccaggagagccaggtccctggtctggagtgacaccttgcaactccccatgagcatattgctgcataaacgtgtgggcagggccccagccagtactcaaggcagggagactacttaggtgctcaaaggggtggacgtttctgtctctcttgtatcttgtaagtgtgtgcagcgagttcctctgcttattcaatgcatgtttagtgagcactgaaaacatgctgtccacgggggagctgagcggatcgctgatctcctggagctcatccaccaaggagcatgggagaccaactgaaattaagatgagatgacaaatcaagaaagttccacagggtatggagcaggttgctgagctgcagaaccaaggcaaagatctatccccacttccctggaggaagtggcgtccctcctggcttaaaggatctctctgcgagctccctgagggcctggaccacaggctctccatctgggcgtctccattgctgtagcagcatgagtgggtggatggatgttgccttctcttcaacctggaagccaggactgtgagtggcagccatgagcactgagacagattcctaggccaggtgcagcggtgcaggcctgagcattgagacagattcctaggccagctgcagcggcgcaagcctggaaccccagtgctttgaggggcggaggcaggaggattgctcaaacccaggagtccgaggatacagtgagctatgaatgtgctgctgcaccgctccagcctaggtgacagagcgagaccctctaaaaaaaagaaaaagagagagagagattccttgccacccatctctctgcttccagtgtgagccccacgtatgaactaacggattttcaacagaactggcacagggcagacagaccatgagaggaagaaggggttctctaacgtctgctcagtgaaacatcaaatagtgactttattagttaatgggataattgttcatgggagatcattagagagcccaaatcaaagaatttcttaggatgtccgaaacttggaaggctggaatgtcatcacgaagataaaagattgttgaggtctgcaaatatttctcagtgacgcagaaaggtctgttgggcaaaagtgtggcatttttatttatttagctcaggctcattgcgtactttattctttcattaaaaaaagtctgagggggcttgagtgaaagagttgattattccactgtttggcaatatttctgtaggaactgtccaaaagctatataataaatcaaggccccctccccaccccccaacaggactgacatttatgaggaggctgttcacagaaagtagctgctgcgtctggcgtgccacagcagtgccccgaaccctcacagacagacaggggagatcgaattgccttgtgggagagcctcttgccaaagccttaactgtttccaggagcagaagtcccaggctgtgggggattcctagaggaaaatgtagaatcttttaacatgggggaaaaaaaatcatcttcatagtgtgaagatttccttgaagtagtctagtacttggttattcacccaacattgcctgcctgcctgctttgccctgcctgccttgcctctctctctctctctctctctctctctctctctctctctctctctccccctctccctctccccccacctcctctttctttctttcctcctttccttctttatctttctctgatatttattttttgagacagaatcccactatgttgcctaggcagggctcaagtaatgttcctatatcaaccttctgagtagctgagactgcaggtgtgagccactctgcccaactgccatgttcccttttttgtttttttgagatggagtctcactctgtcccccaggctggagtgcagtggtgtaatcttggctcattgcaacctctgcctcccagattcaagcaattcttctgcctcagtctcccaagtagctgggactacaggtacctgccaccacgcctagctaattttgtgtttttagtagagacagggtttcaccatgttggccaggctggtctcgaactcctgacctcatgtgatccacctgccttggcctccccaagtgctgggattacaggcgtgagccactgcgcccagcctgcgcatgttctttaaaccagacactggctaacagatacttgttaagctcctcctctgtgctaggcattgctgcagtcaccggacttgtgtcacaggccacccttgtccagcagcgagggctcctggaaggatctctgtcactgtcatcaagatgaagtggtggtgctgctgctgccagccctgtgactttgagcaagtagcttactttctctagtttgcagtttatttgtgtataaactggagacactaacaccaacctggtagagcctctgggaaggccagcagagtgttgcacacaggccatcattgtcatcagcatcgtcattgtcatcgtcatcctcacggcgatagtggtttgagggcagaggttgaggaccctttgagagggttttggagtttcccagagaagctgaatcggctacacatgatggatgaggccagctgtttttgtgctgaggtgaagtgggttcagtgtcccagagactgttgccttggagtcatcggaatcctcctcttcctagagcactgcctccagcttcctcttcttggaagcctgccctgattcctgcagtcctcagccttccttcctccccacggctccacagtttgcccagggaagctggaagcatcacactctgcccaggcccctgctctggcccagtgtgtttccttgaaaggacgtgtgtcatctagaagcctgcagccccgagtcctaacaatggttacccccagggaaggcgtgaaggtcagaggggacactggctttatctgtaagattgttttttttttaaaaaaagaatgaattggcatgttctttgtctaattaaaaatcaaatgaataaagaccaaataccctgcctgattccacagtggggcagagggaatggtgacactgtttccccctttccttgttagctttgtgccccctgatgagtctggggcccctgagaggatgatcagaatctcacacgtcttggtgacccagtccccttcaggcctgcctggctggcacgtgagctcttgatttcatcgtcagggaaaccaagtctctgcagacgtcattgctgtccttggggtgataagggcgcgtcatgtctgtcgttctgccacctagccgtgctgtgataaggcacagcatctgcttgtccttggagggcgaaataaatttagatgtgtcgggtttggaacatcaggtgacctgtccgcagctggagctctcaggagggaagggtggccccgctgtctttgcggtgttagtctcacctccccactacggccggaagctccttgaaagagaaggcacgagctcaggcacatgcaagatgcccagcgatactgtccgtgggtttcttgtttggacagtcttagaatggagtggtggcagggattttacagatcacctggagttgtggttttcaaagactgctctgcagggagagtgtgtgatctagaccaggcttttacccaattgggctttattttaccttttatatttgggcttccgtgtcagatttcattctagggctaaatttgagtttgaaacgcactgttctaggccaggtctcccatttccagataagtgaactgagtcccagagaaacaaggtcttgccagggtcttcccatgatttgactccaaggcaggctctctcccctactgcgttagtttttcctgaggttgccatagtgaaataccagagaccaggtggcttaagcagcagcagtttattgtctcacagttctggaggctggaagtccaagatcagggtgtcagcaggtttggttcgttctgaaggctgggagggagaagctgtttcaggcctctcccgtggcttctgtgggtttgctgtcattatttggtgttctgtggctgtagactcatcagccctatccctgtcttcaccttcactcggtcttctacctgtgtgaatgtctgtctctaagtttcccccccacttttttctctttttttttgagacagagttttgctcttgttgcccaggctggagtgcaatggcacgatctcagctcactgcaacctccacctcccgggttcaagcaattctcctgcctcagcctctcgagtagctgggattacaggcacccgccactgtgcccggctaattttttttatatttttagtagagacggggtttcaccaggttgccaggctggttttgaactcctgatctcaggagatcctcctgccttggcctcccatagtattgggagtacaggcgtgagccaccacacctggccaagtttcccctttttcatgaggacaccactcatattggattagggcccaccctaatgacctcattttaacttgattatctctgtagcaacgctctttccaaataaggtcacgttctgaggtaatggggattaggacttcagtgtatcttctttaggggatccagttgaacccataacatattcacgtgctcatgtggtctggtggagttaaaggtagaggggtcagggatcctgattcccaccgggtctgagggtggacactccttctctcctgagcctggtggggagttaaccactgcagtcccaggctgctcacttccccagtggaccacaggaatgtctgtgggaggagcaattgttttccaggccatgttgcagctttttcaatctccctgtttgttattggttaagtcatagtaattggtaaattattttgctaaaaaacacagaaaattataaggaaagaaagtcaccgctaattttacatctcagacagagccatagttaacgccttcatgtaatttcttctagcttttttccccatacatatacatgtggttttgtttcttacctcttttcttaacatagtatcaaaaatgttttcccttgtcattaaaatcttcataaatgtgatgtacatttttccatttgatgcatatttagtgagtgtcaggcatggtggatacatcagtgagcaaagtgcaaaacttcccatctcatgggctgccctcctgcaggtgaaatgacatactgggccattgggagctcacctagtaccctcaacccagcatccacccaggcccccggtctctcccaacctatggcttacttcctgttggtgaattcttcctttaagcgatcttgaaaataagcccttgcttattttcaaatgaataaatgtgaacccagaataaatgtgatttgtaaagttctcataactatcacatgtatatattctactatttgggttttttccacctagtttttgccattacaattaatgttcaaatgaacatctttgtacttcattgtgacattttgatctatggctcaaagtaagaaagtccactgtctttttgaaggccagaacacagcagcctgtacagtgctgtttgcttcctctggaatgttcttttcatttccagctttgcacttgcatccacagacaccattaacctgaaatgtgatggggatggacaaagtggatgatgtttggcgagcggcctctgcctggcttgcctgcctcggttcactgcagtcagcaggtgtgagaaggatttttctgtctattttaaggcccctcactgaaaatgggaaaaacaagctcgtttgtgcgggggacctcaagccaacacaagagcccagccaccctgcagcagcctgagcgtgacagcgttctgccccataaagagatgctaggaaaacacttttaatggtctctgcctagactctgtttacggaatttatttgccagagctcaggccattcagcagtaccttggcagcagggcccagcaaagctgcaactcctgtctcccctccacgtctgcctgggtgtattaaacccccttgttctgaacaccccagagctagtacccgaaaggcaggagtggggggttgcagggaagaaaagccatgggttgtaggatatttggggccaatataaacttccaaattcaaaaacaaaaactagctaggctcggtggctcactcctataatcccagcactttgggaggcagaggcatgtggatcgcttgagctcagagttcaagatcagcctgggcaacatggcgaaacctagtctctactaaaaatacaaaaaattagtcaggcttggcagtgtgagcctgtagttccagctacttgggaggttgaggcaggagaaattgcatgagccagggaggcagaggttgcagtgagctgtgatcacaccattgcactccaacctgggcgatgggagtgaaactctgtctctattaaacaaaaacaaaaccaacaaccaaagaacaacacaaaattaccctccaaagagctaggggcatgagctactgttggctgctagctgtggccgtttccagccagcagtagaaaggaagatgtaaaatcctgaagcattttgagtactgctttgttttttttctttcctgtttgacgattgatgctgaaccatctttaaagtgtggtttttttgtttgtttgtttgttttgttttgttttgttttttgagacagagtctcactccgtcacccattctggagtgcagtgatgcagtctcactcactgcaacccccgcctcctgggttcaaatgattctcatgcctcagcctcccaagtagctgggattacaggtgtgcgccaccacgcccagctaaattttgtatttttaatagagacagggctttgccatattggccaggctggtcttgaactcttggcctcaagtaatctgcccacctcagcctcccaaagtggctgggattacaggtgtcagccaccatgcccagccccaaaacttacttttaattccttttctcattacaaaaataatatatgtcaatggttgcaatttccaaaacaattttaaaaggggaaaataaaaactgccaatgagataaggataaacactgttaacactttggtctgttgcccttttgtagtttgttctgcttctagggagagaattgtaccagcctcgactatcatcttccttgcccagacatcagatatcatttaaaatggaaacctgtgggttgtagaatcccccttggactgggaggcagaagacccagtttcttgtgttaccacttggtcctgtggccttgggaaagccacttaaccttgatttgctcgtctttaaaatggggactcagtattcctcaccttagcagatggagtggccaaaggtgtttctggcagagagtgctttgcaaagtgctgtgcaaattgctggccagttttgatgtgggtgtgtgagcctttggttggacaaatggccagagtagttttcctgtcttcttgggggaactgtgaccctttctcgtaaagctgttctgtctctgatcctggtgaacatcaccagcttcctctagctgcccagagctgcccctcccctctgccctgccgtgtggcacctggcccagtgcagtgtccagtccctctccaggtcccgatgcctcggcctccacagtatctcctagtctgcccctctcgccccatctccaccatttccacttgatccttgtccctgcctgaactcctgtgtcagctccttgctccctccaggcgcacctacttccaaccaagctccatgcagcagccaggaggctctttctgaaatgtcagtctgctctcgccaccacctgcttcagtagctttccactgctgtcaggacagagtccagaggtcttgctgaagctgaccaggcccggcctctccgcccttgctgactgcttcagcttcacccctgccgctcatctcctgacttagccattccttcatgtttcttcttttctccaggcctttgcctgggctgttccctctgctggatacacttccctaaccctgcttggtaatcaactcaaccttagtcccctgcttcataggtcacctcctccaggaagccctccctggtgacctcacctagtcagggtttgctccccaccctcatgctgccactggccccactgtggttgtctgatgactcacctttgtcttctgtttggctgtgggctctgtgagagtagagcctgggtctgcctgactgtgttttgccagcacccagcatgagtgtctaccctgtaccaggcacttgtagaatcttgtttagatattttgttctcccctggagatggaaaaacactcaatcttcccaagtgttagactgattgctgatgggtcttatttttctctctgagttcttttaagagtcctggaaatgtggactgagaacagctgtcgcatgtcagttccgaagtagccgcttttatcagaaacggtttagagagagattcctagttgcacctcccgccaagggcagtgaccccacttttctctccccttgcaggcccctatccgacctcaatgggaggcgtgggagagttatggggagtacatcccaccggcacagctgtcatgtcagccctgtctggctgccggagttcgactggtcaggcgagatgggcacaggcacggctctgctaaaggccttggctgagcccagcttggggcagagcaagccactgagaatggctttgccagaagactccgtcatcaggcttgggtgtccacagccttggagtgctgaacagctggaacatcctgaggcatgtggcgggtcagttgggacaaagccattgagctgctaaaccaaaccggtgctgctggattgggacggagacagcagtgaggaacatgagctccagtgtcagagggacctggttttcatccaggctctattccttactggttgtgactttgagcaagtgattagatttccctgaacctcagtttccttatctgcaaaatgggaactggagtgttgcaaggattgagtgaagatctgcatggggagggctgcgtagggtctggcctgcagcaagtgctcatgcagcatctgctttcccgtcttcctcttcatcctcacagccgttcatcatcgtggttgtcatcaaccgtcccgtgcggtgcagagctttgcttcttggttctgcctgcttggtggttgccaggtcccgccagcttaagtttatctgttcgttcattcattcatttatctgttaagcccctcttccttcttccaggccagggagccagggtgctgccaggtggtggggagcggctttcagaagtggctcttggcagcgcaggctgggctacatttatggcctttatgtaacccctttgccctgagccccattcctgcccctcagatctttatttactgactctcggcagacttagaggtcctgaaaggcaccccccaacgccctcatctcattcatccttctgcctccaggcaggagggtcctcagccatggcagacatgtggggtgatagccaatcccagccatgagcccctattcagctttcaccctgggcaagatcctgtggagggtcccagtgtggggctgggggagggatgtgggatcagctgagatccttaggaagctgtctctagttgggaagacagcagaaagccaacacgtgacactgggtgacagccctgtgcaagtgtgcaaggcgggtggctgccaaggtccatcttcagtactaagagcccaagggcggggtggggaagggggacagagacatctgtgtggcagggaaggtgccaagtgaacagatgagagagagagagagagagagaacacttttgggtcagcaggttcagcgttatccaaccagcaaacatttcctggatgcttactgtgggccaggcaccaggctatgtgctttgcagacacacactcgtccaatcactacaaagccctgtggggcaggtgctgccttccccacccctattttagggatgacgatgcagagactcagagaggttggtaagttgctcacaggcacagatctctgaaggaagtggagcctggattcacacctgggcctgagtcgaggccatgctggctgtggatttcctccatattggccatggcttccccgtggacgtggaacaatatgggcatgtttgggagaggaggtgtattctgctttggtgggctctatgcagaggtcatgaggcagaaggtcaggggaggctgggttgggcccgggacaccagccatgcctcctgtctgaaaggtgaggtccttgccccgcagatagtagggatccattgaatgttcatctctgatagccgctgtctgcagtcatcctcagggagagagcagagagcaaagggaagccatggacagagcaggcgggcttccaggctatatgagatgcagttcctccttctccaaattcttattaacccactgtgtacggcgtttctcaagtatccagcccaggacttgggatgtaccataaacagcctccacttctgatgacggtagcgctaaggctcaggtaatgccacaggaggcaggagcggctggagcttctctctcctgcagtgtcaggccagagcaggtttttcttttttctttttcttttttttttggcggggggtaacagatccttttttattttttatttttttggcctatgcagcagttattttattttattttttttcagtatttttattttatatttatttttgattatactttaagttctagggtacatgtgcacaacgtgtgggtttgttacatacgtatacatgtgccatgttggtgtgctgcacccattaactcgtcatttacattaggtatatctcctaatgctatccctccccgcttcccccaccccacgacaggtcctggtgtgtgatgttccccatcctgtgtccaagtgatctcattgttcaattcccacctatgagtgagaacatgcggtgtttggttttctgtccttgcgatagttcagagtaggtttttctttgtgacgcccggtcgcaggatgtctttcagcaccacctgtcagagctctccaagccggcagctgttcccgctgcccacctgtcccttccctgctctttttggggatggtttctcgctcccctgctgtctgtcctctctttcccctccccctgcagggccttttggaaggtggcagatgggcatgaatgtcacactggctgtctctttgcctgtgctgtgcgtggggccgtctagcccgagagatcagctcaggcatattccaggtgcggcttatgttggtgagaagttctcataacctgagctgatgggggtcagaatgtgcgtgtggggtgcagagggagcttcccacccctggcagtcccctgccctcctcccttggccagccagccacaagacccacccttccttccttccttccttccttccttccttccttccttccttccttccttccttccttccttttcctccctccctccctccctcgctccttcctttctttttctttttttctgagatggaatctcgctctgtctcccaggctggagtgcagtggcgccatctcggctcactgcaacctccacctcctgggttcaagcaattctcctgcctcagcctcccgagtagctgagactacaggcgcccacaaccacgcctggctacttttttgtatttttagtagagacgggatttcaccgtgttagccaggatggtctcgatctcctgacctcatgatccgcccgcctcggcctcccaaagtgctgggattacaggcgtgagccaccgcgcccggccacagactcactttcttggggtttggcaggtcagcaggttttgtgctcatttggctttagcatgagaggagtggttcccagccccgcaatccagctgcagtgttaacttcccactcatctgttacctggatccctgtttcccacaggggcttcctagcctcaccgggtagaaacttcagaattcgcccatgggttggatctgtcccctcttctccatccttggtacttgtcttcctgcatggactggtgcagtagcctcttctttggtcctctgtttctagctggtatcttttttcttccttcccatttattatgactttcttgcttgctgttcttaacactcagaagattcttgacttctctgaagtcgtgaaacttgacactcctagcagatatcaagggtctgtccactgcctatggttccttcaccatatacttcccctccaccccaccctgccagcagacttcaggcccttggggaaacccagcagcagcatggtgggtaatagcgtgttttccaagttatggtgtcaaatctctgctcttctatttaggagctgtttgactttttttttttttttaaacctctctgaactgcataaacagaaaaaaacagattttcttcttgcttctaggtctttggtacagctgcatcctctgtcctctccacctggccaagctttacctccaatgtcagtggatccctgtcccaaataaccacccaccccctcccccaaggccctagagcattccacatgtgtccccaccaaacattcccaaggaacccttgccatggggagcaggactaggcttcaggtgtctgttttcctagaaggtgcgtgtgcctcctccacctttgtaagcctaacccctgttacaatgcctgggctctgcgggagcccagaagtgtgtacaaaaccagtgagcaagcaagggaatcagtgaggaaggggaaggaggaatgaatgatgaggcagcatcgccgcagcggggccgaggagaggtcccccggagcatgcccgtgcagccctaggggtagctcctccctggagcaggtatagctcaccccctagcctggcagccctgtcttcacacctccacagtctacagggtttcggcatttgcttcagttatttactgaccatgatctcctaggtcagatttatcatttactgggtcaggaaagaaaaagccccatggggccaggtttatagagattaaatccactcatgccgaagctggcttcctgcttgggggatgctgcagtgatgcctcaggcctgttcctggagcccgtcagtgccggctgctctgggagtggcctgaggtctctctgggacatgtgggctggagctgcaagctgggtgccttctgccagctgcacgtgccacctggctggccatcagaatgccatcagagagggctggctggctggctcctgggcctcccaggaagaccatacagggactggagtcctccctgctcaccgggtcccccaggctccggcagaggcaacgggaggaaccagttgatcagaaagctgagcagattgagctggcctttcttgttagtttcctccaacagtggtcccctctgagggcagagctggacaggcctcctctcgggcccgtgtggagggtattgcatagaatctttctcctaggaactgacggaagtaagtcttacggagattagactgatttgctgtgttttgagttcattttctccacccaggcatcaagatatggttacgatttctgggaaccatttccttagactgctcagtcctgagggctgaggtgtggccggcacctggtttatctgagagggcctgggctcatgcactctgttgcctctcggccttccacaagagtctgcagggattctctcttattgatgggacacagattgtcctcagccaggccttcatgaaacaccacagtatttcatgtatgtgtgtgtgtgcagtgtgtgtgtgtgcacatgcaagtttgtatgtgtccgtgtatgtttgcaagtgtgcatgtgtgtgtatacatgcaagtttgtatgtgtccgtatatttgtgagtgtgcatgtgtgtgcgtgtgtgtacatgcaagtttgtgcccatgtgtgtttgcgagtgtgcatgtgtgtgcgtgtgtatacatgcaagtttgtatgtgtccgtgcatgtttgcaagtatgtgcgtgtttgtgtgtgcatgcacgtgcacgtgtgtgtgtgcacgcccatcaccagactgtaagtatcctgaaggcaaggtgttggctgtcttaggtcccttccacctcaacagatatcaagggaaatgactctgacctggagacaaggccgggacggcaatggggtgttgtggagagtgtcccaggctggaaccagatggcctgaattctaccacagtccccacttaccagccctgggccttaagccaggcctggttcccggcccccgcacatcgtgcatgagaagcatggcccttgctggaccagtaggcgtgtctgccttgcttcagatagtcatctctgaattaaggaagagctctcctgggacctgagtcttccctggggggcagggacagcttggtaggcagagaagggagcctcacctgccatggttgcagtggggtgaatgccgaggctgccaccacttgtccctttctcctccagtgaccaccccccaacctttccttctccacaaaggaggggcagagtgacctcccataagtgggcttctctcatccgccattgttgttctagcccttctgtctccctcaaggacagggccgtgtctcagtcgccagtgccccagtgtgtagcacagtggctgcacaccgtaggtgcttgctatgtgtgttggcttaatgaggagtccaggggcctggctttgagtttctttctactgctggccacccacatgcatccctctttcttcaaactgctgggaagcccatagctcagtttgatgtcaaaagcaaagctctctttcatctgatgtcatcgggggagctcatttgattttcccctccctcttttgctgtttgtttcctgttctttgtcttttatggaacaattgaacatgtgcctttattggaagatgctgtggatcgttttgggaagtaagcaggcaatgaataagtcagtgcgttagaaacgaaggggagaagaagctccctgctcggcctaggaagcaggcaggtctgagccttgttcctcctctctggagaatggacatatgggcacctgccctgtagaccttgaggaatgagaacagaatgggttctggtggtccagtgtgctgggcagcaatgggcatgtccttcttccagggctctagaaggtgggtctactcaggcaggacgatgctatgtggctcagggaatgggctgtgctacaaccagcctggaagaggccagggcttgctgggcgggcacagctggcagctccccattctggaggaaccagccaagagcatgctgaggcgggccaccagtgagtgctttggggggaccaggtgtcccaagtttgagcaccaggaggccagcgctgttgctttgctcttctccatccttgtccaaaaaaggagttcgctccattaagaggtataaataggagtgctgggggtggccagacgacagggccgctctgctcatatcctcgaccaccacaggagggccgctcttgaagtcctggccagcagcaggagacatctttttaagatgttggcaagaaatgagagttaggcaatcttccgtcaccctccgccctcctcccacccaccgtggccatcataacacagaatttcaaagaatgagctcccagtggggagaggttaaacactgtggatttgttgtttcagggaagaactcgtggccagtgacctgctggagaagaggcaggaggaaggaaggtgccgtggtcagcatgggagggaggcagggaggggctgagaggcaggatttgcagtcggtcaagcctgggtttcctcagcttcattgtcacaaaaaagcagagagggaggacagccgctgaaggcagaggcatggctttgagaggtggccgtagtgatgctgtgtccagctctgtgtctgactctgcccagtggttctggaaggaaagcagtaccttggaagcaggcatgggttcagttccttgcccctccacttactcattagatgtccttgggcaagccctcacgcctttggaggcagttacccgcctgtactgtgggacaaataaataacgcctccccagggggtctccatgggcaccagccaagacctgtgtgggaggggagggcctgtgcactcagggcctggggccttcgggtggggaacatggctcaccaggcctcgagatggtcttgaggggtgggcattgggtctgcctctctgtaggcctggtgacagccctttctggggtcattagcctgcagccagcttttttcccagctaagtctgaatggtgaaagccggatctcccatccaggactgattcagtggccaccacttcctacgcttgaggaaggaagaggaggaaggcctcctatcatcctcagaaccaccacctgcctttggtggttgctcatacgtgggcacctgccatggctattgctgcgagtgtgcctgtcttcactccctgtggaaggtgtgggctgctgtgcagcttgcaaagcgcttttcacactccctgagcccaagttttcattcttgttttacggaccaggctctgagaaattgcctcggtcacccacttataggcaaagcctgagccacgacagcttaaccacaggtgtgaccagctcatggccagaatgtgccacaggatggggtaaggatgcaggctgggacggggctggaggcccagcccatgactgccagatgggcctgttgccagtgccggctgccatctctgatgggaccctccagctccagcccctttcacatgtgggtcctggagtctctggtcccaagcagctaccgcctacacctgtcttattttttcagtgcggcatttagccatgggagggagaggtggtgggagaagtaagttaccttcaagtctgagttggcatgaacttgccaaataaaacatttaatgtattgccaagaaacattttgcttgcttacttcttagcagaccaagtgcacaattttccatcaaaacttttccattgctcaaaagtgtctctgacaccgaggctggatcctgcagcatctttgtcacagctcacattttatttggaatctggtgttttcagaatgtcaccacctcttgctttgcgtttcccgatggaaacatttcacaagaatcttttcagctgtcgaagtggtgcaaccctctttcagaaggttttatttgtccagcgcagagaagaaccccttttttgtgaagtccctgccacgtttcactggtcagttcagatcttgccaggctgccatggagtggatcaaatcccattacagcaaaagctgtttgagtttcatggacacgtttgtggaaacaattgcagactcctctgttgacagtctacttccagtgtgtaatgtttgatagaacatgcacgcagcacagcagaagaatttggacagccctcagaatgtgctggaatggaatttggctgggcctgctgtccaggtctctgatggggctgtgggagaatgtttgcccacccattaggcagatattcaatgggctccgtctgtgttgcagatactgggctaatcacagagataagtgcaacccaggccccaccctcagggagcctagtcagtagggaatggaagagacatctgcattttgttcctaaatatgtcagaatcatgttaggaagtggatggaatgtgttatgcatttattttaatgtatgtcattaaaaaaatccagccactgcaacagtaattccactatgttattacttagaaagactaagttggaaaaagacaggaggggcagttaattacaacctaagttaaagaaagatattgagtaaatactgtaatggtggtaactctttgatatggtttggctctgtgtccccacccaagtctcgtcttgaatcgtagctcccataattcccacatgttgtgggagggacctgatgggagatagttgaatcatgggggtggtttctccattactgttcttgtggtagtgaataagcctcaccagatctgatggttttataagggaaaacccctttcacttggctctcattctctcttgccggccgccatgtaagatgtgcctttcctcttctgccatgattgtgaggcttccctggccatgtggaactgtgagtccattaaacctctttttccttataaattacccagtctcgggtatgtctttatcaagcagagtgaggatggactaagacactattataggtggtaggtaaaaaccatgacagcagctcatgaatgactggtatctggaaaaaataagttcaggtgtattttgtgttgattggttgccaggggctttacctctgttctcatccagtccttgggaaccctggataatggtagtgtcagatggtagtcccaactgacagctgataaaagctcataaagttcaaagaagtgaaatgattcatccaaggtcacatgactagtaagtgagggaacttgaatttggatccaggtctgtcaactcctgatcctgaactcttagccactatgctatatggcaattgatcaaattaaaaagtgatccttccctctgcagagtgtaatccaggaaagcttcctaggggaggtggcctcaactgagtggtaggctttagcaagggaagtttgggtggtaaggtagaatgtcccatgggtcagatacccataattattggctggatggtttgaattatagtgacttaaacactttttcctcatataaataaaatcttgagttaggccatgcgttggctcttctgtgtcatcagggtcctaggctgcttttatctctcgattccactaggtgtctcatgatccaagatggcagatagagctccagccacaatattcttgttccaaagaagtagaaaaagataagagggaaagggtaaaagtacatatctcccaatgtgtgagccccttgaaggagcttttctggaagggaaagctaacaagttattcttgcatctcattggctggccctggttattagggaggctgcccactgtgtgctcagcatatgtgaatggaggacaaacatcctgccctcaaggtgcttacagcagatcgaactgcttctcgttgaagctgtaaaggagactgcagttgagtgggtaagaaaaagcctcctctaaccagacttgcctctggagtggccccaataagctcctgggtctgttttggtttcttcaacacatttatttggtgtttaattggaggggaaagttgcagcgattatgtcacctgcccaaggcagcccctgcccaccatctcatcaacccttctgaaaagacaagagtcactcttggtacaaaccagtctcattccaccacctgccatcctctggtgcaattagagcaagagcccactttccacccgaatcctggattggtgtcatttaagctcagcagagccccgtatggtggtgaccaggcccaagttctgtgcagcttacgggcaagagtaggacctgggcactgtgggccacccgggctccgtcctccctctctctcccctgaggacctgggtttgcttttcacttcttatctcaggagggtatgctggccagttgccagaaatatcaaaagtttggagagttctttaaaatcagtggagccttctgggttgccaatgttgttccggggactggttcagagatcaaatcttgttcatgtgaagaagccctctctgctgggatttgggttcatgtgggtatgaaatgcccttttcactttttgggaattgggatgctagaccatggaaagaatgttcgggctgaaatgggagccaggggtgggatacagcccctgtttctccatttgcttgctcaggagacttactccacctggttggaggcagagatggggagagatggcttctgatgtcctcagccaggcatctgcctttgttctgtaattacctccaagtaaatagtcttggaaggaagtttagagagatgtttcatagggtgttagaaatcaaactgctattaatatactaattacagtaggctcaatacttaccattgaaacaggtcctggagagcctctccttggcaacactgttagacattctgttcttgaaatagaaagtccatattctttggtgaaagctctaaatccaggctttccctatgaacagccagcccttttctttggattcagtaggttcagctgcggcctctggcagcaaaggctgggtggagtgaggtggggagaatttgacgcactcagaaagcagtcagctcagcagaggtgtccaaaggtgctggggccccagaggtcccagaccagctacctgacaatgtcattgtacatctaagcattatttttagcaatgacatcactgctactggttttatttttagattgatgctgcaggtgctgtttggaaatgtcttttttccccacatcacttttgtcctggaagtacccagtatatgagggaaacaaaatggcagccaccccaccaagggcaatccattttttctttcttttttttttttttttttttgaggtgacttatactttattagtgtgacttcattcatttttctgtagaaatattactatgttgattttggggatgtttgatatatatgacatatatagattatatttctaaaatctgataagttctgaattctgaaatacatgtgatctcaagggtttctttatttaaaaaaatgtctataaggtagataacatgatgttttgctatatatgtacttagtgaaatgattgctacagtcaagcaaattaatacatgcatcacctctcatagttacctttgtccgtggagtggggcagaaaggttaagagtacctaaaatctactctcttagcagatttccagtgtacagtacgatattattaactatagttctcatattctcatagtgtacattagatctctagacttatcctacataactgcaactttgtgccctacatctccttttttttttttttttttttttttgagacaaggtcttgctctgtcactcaggctggagtgcagtggcgcaatcatgcctcactgcagcctcgaccttccaggctcaattgaccctcccacctcagcctcctgagtatctggggctacaggtgtacaccgccatgcctggctaatttttgtattttttgtagagacggggttttgccatgttgcccagattggtctcaaactcctaggctcaagtgatcctcccaccttggccttccaaagtgctgggattgcagctgcacccagcccatctcctccatttttaaggctgaataatattccattgtacagttgatccttgaagagcacaggtttgaactgtgtaggtccacctttatgaggatttttttcaaccaaacatggattgaaaatacagtattcaagggatacaaaaccctgagtattggaaaggctgacttttcatatactcaggttctgtagggccaactatgggagttgagaatgcatggattttggtatccatcggggactggctctaggactccccgagaatgccaaaatccatgaatgctcgagtccctgatataaaatagtatatttgcatataaccaatgtaattctcctgtatactttaaatcatctctagattacttctaatacctagttcaatgtaaatgctatataaatagttgttatactgtattgtttagggaataatgacaaaaaaatacaaagtctgtacatgttcagtgcagacacaacaatccatttcctgtcaaatatttttgatccatagttagttgaatccacagatgcagaatccatggataaggaatgccaacagtatatcacaatttcattattttttcatctgttgatgaacacttagattgtttctatatattggctagtataaataatactgctagtataaataatgctgcaatgaacatatgagtacaggtatctctacgaggtgcttattttatttcctttgggtatatatccaaagagggcttgctgggtcatgtggtagttctgttttccaatgtggaaaatattaaaaggtataacccacataaataaaagctcctggctaggtgtggtggctcacgcctgttatcccagcactttgggaggccaaggtgggtggatcatgaggtcaggagtttgagaccagcctgaccaacatggcgaaacccctgtctctattaaaaatacaaaaattagccaagtgtggtggcatgcacctgtaatctcagctactcaggaggctgaggcaggagaattgcttgaatctgggaggcagaggttgcaatgagctgagattgagccactgcactccaacagcttgggtgacagagcaagactctatcacaacaacaacaacaacaacaacaaaactcctttgggatctataataatttgtagaggtatcaaggtgtcctgagtccataaagtttcagagtcactgcagtagagggaagaaaaggacaacagaaacagtgaaacttaaatagcatttcctgagccctgagaaacaaccgatgctatatagttattttttcactctaagataactcaagatagaaacttttaaatctagagagctgataaagtaagataataatacattctgcaggcctaagaaccctgatctggaggatcaagactgggtcatgcatacattgcattagacagcgacacctaatgaacaacaatggtattacaacccagctctatgaaaccagggactagcaagagtaaatgctgtattcagactaaaggacatagataagagcacattctgtcaggcagagtatttcattatttgatattcttagacaaaacaaattctcagggtgtggagggcaatttacaaaatatataatgacagttcatttgcttagaccttcttccttagttaagttgaatgttagtggtccatcagggaatctggagcatagagtagaatcacaatcaccttggacttataagaaataattcaaagactttatagaatcagtctctagtcccagaattttatgtttttaccatgttcgtggctcatgctttcttgatttctggcatcctgtctgatttctgagtttgggctagctagagtcttgtttgtctatcttcttgatgcccaataagatcagcccctttactgtgcctggatttctatatccagcattacctaaatccaactttacacaggctttgggctcttccagttcctcttctgccctttaaccccatgtgtgccccagaaccatccacaaggagatgccaagaatagagaagatgaacaacaacaacaacaaaacagaactgcagcccttctgtatgcttcagtctctagcaggctcagcccaagccactaccgatcccttttctcacaagttttcaatgcaatctacaggaggctttgtattctcatataggaacccttctcaaaactgataaaacgataaaggctttgctttactaaaatttgctgtgccagccctctctttagcaactgaccagtgctgagctatctcatgctacctctatggcattgtcaaagaaggcagggaatgtctttgcccaccaaagaacagcatgtgtgtgaggcccatgctagggaagaaaaaattcttaacaaagtgaggtgtgaaggtggctgggggccaactggaccctggagcccaagcgaagtgaagtgatgccagatgccttgccctatcaaagtaatgaaagtgatctggaaatggtgttttttctcattttaatgacagagcagggctgggtaaggaataactgtaagtgcagatgaagcttgtttatgctccaaagataaagtcacaaatggggggtagggtgggctgtggccttcccttgctctaggcaaattccctcagcactagagaaggtgccttccaaagggcctgtgttgtgtctgcagttctgttcccagggaagtggaagctgaggcacctgtggtaaagcccctcatgggagcgggggtcagggagatgtttggaaaggctgtggctgataatgagacgcgggtaaccctggtggatatcgttccatcctggtgcgtgccttcctggttgcctcctgctgcctgctcctggggagtggagtgggggaagcattagtctggattgttgttggcttggttgccttccagaggcctgcatccaggtgccagggaaattctgactgaagtccattcaacaatagcaatagcggctcacactcaggcctgctggccccaccattgacagctttgcatgagcttctttccatgcaagagggctgtccccaggttcactccccacttcttgttctgctgcctgcattcttggccacgtagttaagtctccctccctttgtgccccctttatgtctctggtcttctccaacattagccatgccattggcagggtgggggtgggtggtggggcacgcttcctgactcggatgccttgaccccacagggactgagttttggacaaggtgcagcggcagcctcccaagccaggggtgggcagcgtctgctgagcagatcctggtcctctcggggtggctgcatcaatcacacccaaaggggagaggcctcagtatggaaagtatgtgagccttggatggaatcacggatggcccgaaatggcttggccccttgtttctaaggccccggctggtttccccattgtgcagtggggagggagaaaggggccagcttgcctgagttcctggagcacgagtgagagtccctgagccacaggtaggtgagggcaagggtggcagtgttttggggtgtccacgcagcatgcatggctggtcctagctcggatgttgtctgacagtcacccatgaggaacaggagtccctcccattactcagccaagggcacagagtgattatgcccggggtgtagcaaatgctctgcaaatagtagctgctctgaccatgtgatttgactggcattgcccagatgctgagtggtggtgccaggattggacctgtatccatctcatgcctccacccaggccctccacccggcagcctggccgccttctcctggtcctggtccccttgcccccaggaattgaggcgtgcatggtgcatttccatctcccaaatcatggtcctgtctgtgccctcatctgctcctcttccacaggcctctcagggaggcaggcagggcagagtcagcagccccattttagagaccaggaaactaaggcccagggattcctcagaggtcaccaagcttgtaaatggcagcactgagcctcaagccttgctctttggatcatccactttgtattagtctgctcaggctgctatgacaaaataccacagagtgggcggcttagacaacaggtatttctttcctcacagttctgggggccacagttcaagatccaggtgcctcagggctggcttctgcccttgctggtttgtagatccactgtcttcctgttatgtccttgcccggcctttcctctgagctctctggtgtctcttcctctcctcctaaggacaccagccctatcagttagggccccaccctgaagaattcatttaaccttaattacctccccaaagccccacccccaaatatagtcacattgggggttagggcttcaacatatgaatttggggacaacacagttcagttcataacacaccctgagccccctccactgtttggagtcccctaggtcacaccaggggggttgctggtgctgtgcatcagaggagccatttggagagactgtgccagaggccaggggtggggctggggcaatccaggaaggcttcctggaggagatgtgtgtacacacgagagggcttgggggcagtacatgcccttacgggggcctatttcagggaaccccacatgtaatccacaccagtaactcagatgagctgtagctgttttccaggagccactttctctccatggttatggcaagaggggagcctccgggtcctgcgtggcccagcaaggcagctgtgggttgatgcagcaaagcaggttgtgtttccaggtcattcgtgtggaagggaatgggatcccaggtgggcagggccaggcaacaaaggccagaaatcgagctgagcacccacgaagccttcctcagagcaaagacctgcagaggggaccactgcatgtggcagctgccccagatgctgtggccctggctgctgtgggagggtaatttttgttaagatgaactaagttgggactgcatctcacacagtggcctttgtataaattcgcttgccttcctcatccggtatctgtcccctctttggttcacaccctggatgcaggtgttcgggggaatgtgcattgccacacttagaacattcaagtttctgccatccctgtgtttctggagtgacagtgatgttcccgggggggaggtgtgggttcatgcagcaagtcccatgcagagtccggggcaaattcaggtcctgagtgaggtcgtagtgggtacctggctagcaggctgaagggaggttgaggagattgaggaggctgagggggcttgaggaggctggggaggctgaggaggcggagggaggctgaggaggctgaggaggtggagggaagctgagggaggtagagggaggtggagggagactgagggaggtggagggaggttgaggagatagggggaggctgaggaggccgagggaatctgagggaggcagggagggaggctgaagagtctgagggggtgaaggaagttgagggaggctgaggctgaaggaggctgaaggactctgctctttgggtagaacttcctgtttctcatgtttcctctctgtagaccacagtgcccagccctgccccaaagcagagccagagcttgtgtccatttcttgggtgtgtagtgtgcctttggcttctctttagttgtgccttggaatggcacacggggctgggtgggattctggaggcgcttagtgggtggcttctcagagctcaggccacagcccttgtgagtgggaagagtctgtgtgagtgggaggagcctgtgtgagtgggaggagtctgtgtgagtgggaggagcctgtgcgagagggaggagccttgtgagtgggaggagcctgtgtgagtgggaagagcctgtgtgagtggaaggagcctgtgtgagtgggaaaagtctgtatgagtgggaggagcctgtgtgagaggcaggagcctgtgtgagtgggaagagacttgtgagtgggaggagactgtgtgagtgggaggagcccctctcgcagctccatggtcaagtgtttgaggctaagttaggagaagatggtctgtccgtcctcttcctccctcctccctcctcctcttccacacccggcccggggccctttgctctgggtcatgctctgttcccaggccctgtggggatgctgggaaccctgggaacacagctcccttcctgcccgaggccctgagcgttctgagcctgtggccgctgcttctctggtgggaaacggtggtttcctcttgagggaagtgttagtcgctgcctttccctccctctgattcccaaggatgagtctctttgggacagcaggtgcctctgggaaggtctcctggctaggtgggctctggctccctgggagtactgtgggctttggagccaaaaagacctggacgcagatcccagctcctccgctgatgcactgtgaccttgggcaatgcacagaccttaaactggctgtgccctggttttctgtccagcaggaccgggcagtgctgtccactctacagtggaatgaaggcagagaatggcgcatcagaggtgcggctcatggcaggtgctaaacacttgggagtgtctgggcgcctggtgcgggaacatgagcagaagccccaccccacttggatgtctggtggtcttcgctgctttctgactgcctagatggggaggcctcgaggccatcatgattcaaccattctcttactcagcaagccctgaccaccattcattcattcatccattcacttccgagaacctgccgcgtagtaggccttgttctctgcactggggcacacaaccatggataagacagaccaggacttgtgctccaattctatgttgaaggtgagggaagaagttaattaagcaatcagccaagcggatttcaaaggacagctgtgctgcacgccactgaggagacgtgagaggaatcctggctaggggcctatgctgggtgcccggcagtgggggaggcgcagagggggttcagaattgaaaggctgggtgcggtggttcatgcctgtaatcccaggactttgggaggctgaggcgggcagatcacttgaggtcaggagttcgagaccagcctggccaacatggcgaaaccctgtctttactaaaaatacaaaaattagccaggcgtagtggcgtgcacctgtaattacagctgctcgggaggctgaggcaggagaattgcctgaacctgggaggtggaggttgcagtgagccgaggtcgcaccactgcactccagcctgggtgacagagcgagactctatctcaaaaaaaaaaaaaaaaaaaaaaaaaaaaaagaattgaaaggcagccttgaccttaggaagtgtgctcaccagctgcaagctgtcccacctccatactcagtgattattggaggtgatgctactacaagaaggaataatattttaaagaataaagtcagttcttaggaagccggtagtaaccctgtaacaatctggtgtttaatcatttagataaagccatagcctggggtcaaagattggctggaggtgtgcctggagcattaagctcatgctcaccaccaaacttcctgtcccttgtaagtaagtcagtgtcatcccaggtgctggcatggccagtttaggatcaccctttgcctgtgcctttggggaaccccaggacacttgagtctgaatggcctgatgtggctaggacaagggcagtcttgcgcaactcttccatcttgggaaaacaaatgtgattcctaatgtgttgcctcgagttcctggaaccagggtgtttgttttatgtaatagacagcagagaccattctgttgacttcagagccttcctgcatctaaactataactcttcataaaatgtcctttcaatgtggtttatccaggatatcgcagggaaggaagactaaatagtgtctcacagggaagaagaacattctgcatttcaggtcaccaccttgagatacgaacacgtgcttttgagatttggggaccttaattcctctgggaaactcctctctttgctgagtgctggggctgcccaagaagcatgggacccttggagccttattatagccccatgggtcagactgaagatcaggtgggtacattgtgtttgaagcaacatctgtatctcccaagccacggcaaaggagcatctgaaactcatccagatttagtagatgagactaagctggtgaacactcagttccatttaaccccttattggcagcctatgctcacactctttcctggttggcaagtgaagaaggtgggtataggggattttggcaaggatgttagtggatagagtattttttgactgggcatggtggctcatgcctgtaatcccagcactttgggaggctgaggcgggtggatcacctgaagtcaggagttcaagaccagcctggccaacatggtgaaaccctgtctctactaaaaatacaaaaaattatctgggagtggtggcagacgcctgtaatcccagctactcgggaggctgaggcaggagaatcgcttgaacccaggaagcagaggttgcggtgagccaagattgcatcactgcactccagcctcggcgacaagagtgaaactgtctcaaaaaaaaaaaaaaacaacaaacagtagtttctgaggacgaaccttgcaccaggagctgtgctaagtgccttgattgatctgtaccttctagataggtcatactattattatttctattctaggaccagggaagtaaatctgagaaaaggtcatgcagctagtacgtggttgtagaaggcagagtataggttcagctgctgtagcaaagacctagactaacattggcctaaacaaggtggaagccggtttgtccctcatggaacagtgctggggttggggtctactagggctgctatggaaactctgtctgcatggtcacccagttcccagtctttttctggccttacaatgttgccctcgttgacatgggccaagatggtgcccactgtgtttacattctagcctctgggaagagggaagctgggaggggaagaaggggcacaccttttctctttaagggtgttactcagaactaacttggatctgttgtttctgttcacattccattggtcaaaatttggtcacctagccacccctagctgcagaggtggcagggaagtctttcttttggagctaaaaatgggagatctattactatagaaaacatgatgaacagctattgggtgacagctagtgtttctgtcccagaggtggagctgggatatgcgtccaggaggactatgcatgggttcacgcctctccctcttcactacctcctcctggaggacatctaggtcagcatcaaggaagaagagtccggagctagaccaagatccttgggcaggggtggcgggtatttctgctgatcctcggattctctgggcctagcacagtgtagggcgcaaagcagggttcagtaaatccatcttaaagaaagggagggagagggagccagccttgcagatccaaccccagcccaatgagctgagcaaacctggatgtgaatctaagggggctgggaactgagacaccaatagccagaaggcagctgggtctggaggggttcccttgggggtggagctctgcaactgctttgggctggaccagaggttcagggtatccttttggctcccagggcttaaccccaagattgaaggacatctgtgagctttgcttccagaatggaaattttttaagaagccacctttgggaggaactgaatctctgtcctggtggtggttgcttgggccatgccatatactttctgaatttggttgcagctgcttgtaggtccgtgtttgtcagctgctgcccccaagtaaggctgtctgcaaggaagggtctctgcctccctcctgctgtaccccagctgcccactttagctggccctgacttatctagtacaaaatgcagttacggtctgacctttcagaaccccgggcccccatgaaggcatccttgaagggctttcaaaggcagcatactgcatatgaggagtttaaagtttgcctgtctctgtgactgtattttctgagcaaagcttttctccatgcaggtgcgcagaaggaaaaataagtaagcataagaggttccagtttggaatttttcaatcatctgaatgttgttcttggcaaggagtaatttaaaacagctgttatgggttacatttttagaccagttagaaataagggtttcaccacaatcatattctttgatcatcctaattatttttttttctttttcccagttatctctcttgtgctgagtaactgaggagctacctatcaggtttagcgtcagttacagacctgtttcaagcctggcagttggagggaagagaaaagcattaacacggagcagcagcgccccaggctgagacagagcttacaaggtctagacagttatgaaatatgtgggactctttaaaaagaaagaaagaaggagagaaacgcacatgttttaggttctccatgcttgtattctgtatttgtatagctgagaaagctttagtttaaaataagtggtatttggcaagcagtggtattgcatgctgacaaattgattgtgctcttttacttagataaaaatgaaaatgcatgaggcatgttgcttttttccccctcttgatgattaaaaaacgtctacttggctctctgcagagacagcccttgaagatttatatgaaacacctgtgtggcatcgatcacaggccttcaggctgacagaagcagctatgcttcatggcggttaaaatgccaggtcctgggagggggtttggaaagacctgaataagggtctgtatgccaggcttgggtgggacccttcggtgagggtctttgaattttaataaaggacctccccacgctgttcataatgatgtagggcttagagcagctaggcaggaggctaagcatgccctggggtgatgaacaagacaaaagccttcccctacccggcctcagtttccccaccaggaagatgaggccatcagactagctttcctttcggttttctacaagctctatgactatgttcccctcaacacaccctttcttaggctctggcgttattgggccataaaggatgaggatgtcagtgcagacaaggcactccgcttcctgtgtagcagttcacagcctgggccagcacagggagaaatttggaaacaagtatgttatgatgcagccatcagctgcagttgatgtgttgggtcatgaattcattcattcattcactggtcaaacgttattgcaccccggctctgtgccaggttctatgctgggtgccaacatgtgcagggaactaagcgacctggtccctgactgctccaagtcgggtccaccccatttgggcttctgtcctgttggcttaaggacttgccctggtgtaggtctcagcacaggaatgtgctgtgaaatgcaattccaacaccctattaaagccaagcatttacttctggaccccggggactttaagacacacccttaaggagcaacggatttgttttgacaaaaggagtgtaaacaggatcctggtgaatagctttctcatggctgctcctgctttcatcaattgcatatttattggtgacctcataagtgtccagactgtcctgggctctacaggggaggcaaagggggtggcggaggagagagagaatttacagcttagttggggaggcaaggccagctctcaggatagccagcgaaggtgtgagacagcacatcagttacatgatcacacatgtggtgcagctcacagaactgaaggaactcagggcaggaggggggcagctactcggctcagcttttctttttgggaagagcaacggaagaaagggcattccagatcattctcctggcccagccactagatgttgaggcccagttgatagccagccccaaagctgccacagctttcccatgtctttctatcctggaggctggagcacccctggacctgaggaaattgattgaccaataggtcattggtacatctaggtgacaggggtgcctcctccccaccgtggacccctagaggttgccagatggtgccactgatgtgatgtcatccacctctcagggtcccgagtctttgtctgctgctgccatggatcccttaaaagttaaaagatgcagaataattgttctgctgtcagcaagagctgagttcacatcccagctctgcctcttgctagcctgtgaccttgtgccatttccttctcagtgtctcgattttaggcatctaaaatgtgggctgatgatagcacctgttctggaaggctgttgtgaggattgcatgagacatgcatgtagtgtgcctagcattgtgcctggtacgcaggaagcacctcattcatgtcagttgctattgtttccattattgttattataatacatcaggtggcaaagtggaaaggccagtgtctgaaccaaagctcatgtctttctgaaaaccagctctaccaaactctaaagatccgtgtcgaaaatcccgacaccacgagctagaattctgctaagctctagccttccctgtgttagattctgctgaagcaatgtgcctctcccccatctctcatctggagtgtgggcattggtgagctcgtgtgcctgtgaaacacccatctcttcctccttcaggacacgaagcctagcccttcttgagtctggggccaagctgagcaaagatggaaggaggcttggcaagagttgatgtcatttgacatttaatcaccaaagacccagattgggtcccagcgagttaaacccactgcgccctgttcttgggcagacagggttggggtgtggtcacatggttggctgggagaatcggagctgtatctaagactctaagagcacagaataattgctttcaaacatttgtcctctacatcccaagaatgacagccaaagggcagtataacagaaagacaggcttggtctcaaaatgggaatggcctcacagcatggtgttgataaagagtattggatgctctgcaggtgaagtgcttcctgtccctgtgagtgcacacgccagggctggctgagcccttgatggggatcatgttgggaggattaagggtggctgggggtcttgggaccctgagacatcaggactttcaggagaccatcagttgcctccaccttccgaggcattcatttctccagctgcttttggccagcacagccgtgatcctcgctagaccccggccagtggcccaggaagaagccaggcgcctcggcagggccagggcaggaagagccaggtctgcctggaagctgctatttgccttggtccctggcttgcccagccgtttcctggcccggccctccgtggcttttgcttgattagctcatagctccaggggaagccagaccccgggccctggaaggcaagatgggcccccagtcctccctggcaggccagggcagcgtgcaggaaggatgggctgggcattgccatgtgaagtcaacctgaaatgcacttgggagagactgaggcactgagcggaagtaaagactcccagatttcctgaaatgaaagccagggctccttggcgcccctcagagccccaggcctctgcgaaatgctgcctttaaactcatgcttgtgttgctccagccgtattgccacgtcgcaggtgcggggtggtgctgggggcgggggatggcagctgggtgggtttaaagatccccagcagtggtgaaccctccttggggctctgacgctggagaaaggccccatgccctgtgatgtctccattcccaccaggctcacagccccactgtgaagctaccgaaatgggaggcatttaagccccccttgttcatcagccctattttgtaaaaggggaaaccaaggtccagagagaagaatgatgggtcagaggtcatgcagggtcagacgtggagctggacacaaagcccaatctcctagccccagtcccatgcaccgatgtgctttctcgaaaggggcatgccaggcagggcccctgggctcagaccgcctcacttctgggggctctgggcttactgtgctgcagctctgagcagcaggcagcctggcccagccttgcctccgcccagggacctgagcccagggagccatgctgaccctttcgttgccttggacagaagccaccttaggcacagccctcatcatctacttggttcagggaggccttcacttctggcagagcatcaggagaacgtgggctggagatatatactccccagtttggaagcgtgtggcctccctgtcacagtgatctgtttgttggtttgttcaatcattcattcattttagataaacacctgtgctcctgcctgggccgggcactgatccaggtggtggggataaaatggtgaactggaccttacagttaatgcagtgttggaatcacctagggagctttttaagaaaatactgacgccctggagatttgatgcagtcggtctgggtgtggcctaggagtttcactttctaaaactgcatgtatctggatgaaatttctttacaaggagaaaaaaggttgtagaaagaatgtccttctaagtggatggtgtcccaggtgcttttaggcggagcacaggtgaggaaaggccctgggtgttcaagacacaaacagtggtcatcactgaccaaggctgtcccaggtgccccgtcccggctcactggaaggtcccgccacaggccacgcagggtaaaacaaacccgaagttcttctgagcagctgcgcattccccaggccccgcacggaaaggagagctgtctggcagtcacagttctttgctttccaggctcttcctgatctcagtgattttgcagctgtgcttttaggagagctgttttcccctcatttgtaaaaactcaaaaatatggaaaaatagaaacaaccacaggtcacgcatgggtgtgtttcctttttgccccggctcttaaagcaccagcactgctgatgcgccaggtgccttttctgcggacgcctctttggtgtccccaggctagcacaaaagtggaggttgcagtcagcctgccgggcttccgggcagaggagagggctcagagcacagtgctttggaccttctttccgatatgccaggccccttccagcgactgcctgtccagcatcaggatctacctgccaagtggtcctgccgttccctcagtccacccccacccctgaccctccgtttacccagccagttctttgcccattcccactgcaaggagatatctaaattgtttgccttttttgtccttggtgatagaggtcactgccggactctggcagctccattactgctcatggtgatggtatagtccatgtcctgtccatctcagcccccagcccttccccagactcctggatacctccctgactgcatctgatgggttcaagccagagacctggaccctcatcagagaggcaggggcccgcacaagcacccttccacccacccttttcttccttccacagacccacagcctagagccttctttcctccccactgtccccgccacacttcccctgcctggcagcccaggcccagacaccctgcgattcagtggtttcacatgtggcttctccaagtgccaccaaactttgtgagacttgggcttaataatttcgatcccacagaaacatgtgacaagcacaagacattccgtaaaactagagcccagaacgagagggacgaatggcacaggaagatggcagggcttggtttgggtgtgtttgtgtgacacaccatatgtcattttttattcacacaaaaacatctttcttgaagtaatagaaggccactcagctgttgctaaccacataccaaatgtttcctttttcctctcctgcgccttccaaggggcgggctgggaagctctgctgttatccgtgatgccatctcgcctttcaaacgtcagagagctttttcctcggagcaaacgcccgattgttttttccagctttggcaggaatttttaagagaaagctgttttcgaatcacttctctgtttattgtttcaaacctgaaatacggcagagtagagggctggcagcctctgtctgatcctctctccccatgtccatttcctaaattgcattaggatctatcagggacccccttctctgccacagccccccgtaacctggtattttgggaaaatgaagttaaataaaataaaataaaccttcagttggtggagagatggttccaggcatccctttggacacccccctccttccacccccccgccccactccagcctcacaacctttacaatcaacatgtggtttcatttccaagagccccagtgttagcatttccatttcctcaggaagccgcgttccgtccttgctcttacttctgaaattgaacgtgtgttttccttggcccgagctctaggagtgcctggggcaacaatgcacacagtcccaagcaggtttcagtggggtggacagccctccccgcacccgggctgcagcttctccccgctccccgtccccagggatggccgcccactctcccctagcccggtgggagggcctggctgtgctcgggccccgtggccatccgagggaagctgggccgccctcactgcctgtgtcctcgccacctcctattgggaaactctggttgccctccaagagtccacatactgcaggctcttaattaagaaagtatgttcccatttcatgtcactcgaaaagaatgaaaacagtgacagcatttatttatcttaactatcaatatcattcctgtttctcagtccgctgggggtatgagtcttgaaggaattgactgggttatgagatttgaacctcgggcatgtgctggtgggacacatgtggcctgcttccgagaaggagccttgaaggaagagcaagcaggctggcatggccctgccctgccctgccctcccggagctcagggccgaagggctcggtgacagtggggaactcctgcctgctttggtgctaatggagagtcaaggttcctttttcaccagctacctcctatctcctttctcagtcatcggagaagtaaaacccatcatttcctgagtctgatagaggagataggatctgtccagtggctgctgtttctgtggcacctactgtgtgctgaggctgggccaggtgctcacatgcgttgttgccaatccccggcagcaaccagctaactctgatggcctcaggtaaagggacttgcccaagaccacacagccatccagagttgctccactgtggagacactattgccatttggagcagaataattatgtgtggcagggagctgtcctgtgcattgtggggtatttagcacatccctggcctccacccactaatcagtagtaacctcacagttgtgataacacaaaatgtctacagacattgccaaaatttcccgctgctgaaaacctctgagctaggggatggaggtaggattcagacccaagcctgtgcttgttcgccaccctgtgctagctctgaagaagtcctcacccaagcaaggcaaccctgcttgcctttaggatccaggcagcgtggtagtgctttggtgtttctgaactatgtactaatcagctatagatataggcattctagaatattcatgaggatccaacttcgtggtggaggctgaggacagaagttctttaatagtactgccccatcttgctgtggtgtcctgacagtgtagcactttactgcaaagcctttgcatataggttttcattttgagtcttccagatactcattatatctgaaggcttattactcagcaccaataaattgcaagggactgaaacccaactcaaactaacttaagggttagaggaagtctgttggtttatgtgactgaaaagtccaggggtaaatctcatagcttcaggtatggctggatccaggtctcaaacatcatcaggacactatttattattctactttctacagttttgatttcattctctgacaggttctttctatatggccacaagatagccaccagcaactccaggcttacatggtcctaagagttaaaggcttcaaataaagaaaaagtaactttccttagagtgccaaaaaatgttcaagtaaagactcagattggtaaggcctgggccctgtgctcatctccgagcttggtgttggcctcacccaaagaattattataggggaagggatgactctccaaagaaaggaatacaagaccttgtgtttctagagcagttcaaagtgtggttcgtggactgattttactggtctgtgataagtacagagatgcttagaaacactcatagcaattcgttgtggctgtagcatccaggtgtgtgatcagtggactcatcttgtggaacaggtgataaagcagttggctgttgtcagactcacgtggaaagttgggaacaatggagatttacaaaagtatcagtccgtgatggattggaaatttaaaaaactggttcttttccatagatagctggaaaagcactgctttaaactggagagtatgttaaaacacagatttctgggccctaccagtggaattctgattcagtcagtaggtgatatggtttggctatgtccccacctaaatctcatgttgaattgtagctcccataattcccacatgtgtgggagggacctgttgggaggtaattgaatcatggggatgggtctttcccatgctgttctcatgatagtgaataagtctcacaagatctaatggttttataaaggggagttcccttgcaaacgctctgtcttgcctgccaccatgtaagacgtcccttgctcttctgtcatgattgtgaggcctccccagtcacgtggaactgtgagtcaagtgaacctctttcctttataaattacccagtcaggtatgtctttattagcagcatgagaacagactaatatagtaggtctgaagtggggtggggggaatgagaatctgcattttcagtaggctcccaggtggaatattttgagagttactgaaatgtgacacagacaggaagttcgcacatgctgttggggaaatgaaaatggtgcggatagacttgctcgacacggggttgccacaaaccttcaattcatataaaaaatgcaatatctgcaaaagacaataaagtgaagtgcaataatacgagtgtgcctgcgtagtctgcggaggctttcactacaacagcgagctgaatcgttgtgaaagagaccatatggccctcaaactactaccatatggctagtagtaaatatctcccactagccctttacagaaaagtttgcctacccttgccttagaaccagggggtgagatgcgagatcaggaatccctattgaggttggatggaaacagtttttggaatcctggttgaaactgacctccaaggttgatcttggaatctggtctaagtccctgtaatcatctgcatttgtgaagctggcatgccaagaaggtttgcaggttgagaaggggcttagaggttattattcgaacccccttattttatggatgaggaaactgagaccaagaaaggggaagtgacttgtccaaggttacacagagaattgatggcagagctgagaccgacccctgcccagtgctcatccactgtggtgtccttggcaacaggcctggggtgtggtatctttagtggcttacaatgagaataggctaagaggcaagcgaggtctctcccaagcacccaaacctcaccaggtgaaggtggtgaggacaggggccccttggcttgctgtgccctctgttggttgacgtaccctctgttggctgacaacttggcaagtgtgagccctgtcctgggaagggcagagttggaagtgagttggctgtgcccaggcccccaagacgtgtgttgcttattgtatgtgcatgtgtcttagcatgtggattttcagccagttacattcattaccaaggaagtgtacttgctggtacagtttggatatttgtccctgcctaagtctcatgttgagatgtaatccctaatgttgaggtggagcctggtgggaggtgtttgggtcatgagggcattgttggtgatagtgagttcttgtgagatctggttgttgcagtgtggcacctccccttcaactctcctctggccatgtgacatgcctgctcctgcttcaccttctaccacgattgtaagcttcctgaggcctcccctgaagcagatgccagtgctatgcttcctgtacagcctgtagaaccatgagccaattaaacgtgttttctaataaattaaccaggctcaggtatttatagcaatgcaagaatggcctaatacacttgctggccactcacttaacactacttgctggttctcgccccttcacgcctcacctcccatccctgagtgacctaccactttctgtctgttttctttaggacagtcttgaagatccactcagtgacatcctatggtggtctcagacctagcccagaattcttgtcctaattcaccttctcccacacttcagcacaccctgcaggtcctcctggcatctcacctggaggtttcacctccccactgtagcttctccttgcccctcctcccagcctcaagccccattctctctggctttgacctttttccctcttcttcacctggactcagcttctccccctgcctgcattgtctgctcattcccatattctagtgtgctctccatggccaccacccctgaaactgacccagcatcatgagaggatgtcttgccccctctgccacgacaccttccaggacacttcccaattgacttatgcagttttgttacatagacattgttatgtggcttctctttccagtgttatccatgaatgtgcctccctctcacactggccagtgagcaaactgctaaggacaaggactaagcaagtgtctggtaccttgctaaagggactgcctgctgggtagacatggttctgtctgagcgcaaggctggaattcagtgtgttgcaggaaggtgtggcaatcccgccttcccaggccagctgtgggcatgccggggaggtggggagtgtcaatcccttgaagaaacaaacaacacatgtcgttttcttgaagccagttcagtccagctgctcaccaaagcaggatcccagccgcaggagctggtagcctccctgcccaaaagctggggcctgagcccacaggccacaatagctcccaaaccaatgacttcctctgtaaatgtctcagacttgccgccaccccatttttgtccccttttctgtggactgcacgtgaatcatttttgctctaaattattgatttaccagtgagacactgaatccattccagactcctggcctgagagtccagccctttcctgtgtgagtccagcttgccttcccagtgtatctcccagcaccctcctgtgtgcataagtaggcctagcccctcccagggtgctctgctccttagtcaagggcacagctcagtgccctgcagcttatgatgggctttctagacccttcccctttcccagtcaccttcctcttccaaatgtcacatcacagagatgatgtcctccattcttggccagctgttaattccaagcctgttgctggatcagtaaccggccagtgggtataagatgtgtcccttcccactgacccacccacatatccccacgtgttgagttcaagaagatacccttaacatcaaaggaaacttctagtatcaaaaagcaggagacctcagaagagagtttgttgagtgaatgaaggacccaaaatagcaaagttagaatggctggatgatttgtggatacttaggggccgaggagctccccataccctactccctaatgccttttttttttttttttttttgagacacagtttcactcttgttgcccaggctggagtacaatggcacgatcttggctcactgcaacctccacctcccaggttcaagccattcttctgcctcagcctcccaagtagctgggattacaggtgcctgccaccacgcctggctaattattttgtatttttagtagagacagggtttcactatgttagccaggctggtcttgaactcctgacctcaggtgatccacccgcctcggcctctcaaagtgatgggattacaggcgtaagccaccgtgcctggccactactcccaaatgtcttacataaagcagcctctttctggcttggaggaaaagatcaatgaggcacatggaaagcaggagttccatgttctagaagagcaagtgcgcatgcgcgtgcgtgtgtgtatgtgcgtgcgtgtgtgtggacagtgtgtgtgtgcctgtgtgtacagcatcccagtgttctcccacccctaaagatagatttggagacagagagaaaagtcttctgcccttgtcctaggtgtttctcctcaccaaccccaacagaccacactttggagaaagattgtgggcaggcccccttccaagctggatttcaacaacattgccagcttctgttgaaacagatccgaaagggtccactccaagcatgtatcgtagaacttctcatgcttccaacttcaatgtcattgactttccagaagcaacctatacctcgggtttgctcttgatacatcaagaactttgatttgcgcctcctcctgtcaccttgatcattcccaaattcgtattcttccttctgtggcctccttatccatttctataggaactgtaaatgttgcactagggatgattttgtttttgtgtgtgtgcttgctcagaaaatgaacccattgatcttgatttgaggtgaagaaagaaatctaaaaagatcattactggtccttttatttctctctaggcttccaacgagtagtttttttgcctgggatcctctctacagctgggagaggctcggaactgaggtgctgacagcttgtgttggaatcgcatggtgtttactgtgctgggagtttataacggccttgtttccatactgacagcaaatgccatatggagagaaaaaaaaatctgtcaaatgaacccttaagggatcacaatatggcacatgaaatctcaaaactgcttttggaaaaggtgggggtagaggggtaccttgcttaaatcacataagcagcatggtgctctctcccataattgaataaaaatggaatttgacacaaggtaatttactttggttctgtgtttgtgctgggaaaaactgattgggaaaggatgcaaagatttgttttcctccccttgggggattgtgttgagtgggaggcaacgggaatgcaggctgtatctgcagggcattgtgctaacaggtgcaggctgcagacctgtcacaggccgctgagaccaggttccctactgtggctgatgatcacactcatctagcttgacattttattactgtcatttgagatcttgtctgttcacccacacacactcctgctgacctctccaatctgagtccaagctccctgcgggctgggaccacatccctaggtacccctccccgtcagaacctggcacacactgaggctaaatgcttgttggagtggctatttgtgaaccatctgtgctgggagcggtggagactgcgcccacggctgaagggcagagtttaggctgcagtccagggctagttggagccacaaaaccatttgagagtgggccaagaggggacttggcaggttgctcatccatgctgatccaaatactcactcgggagagaatgaaacgttttagagtgccttcttcaacatacgctacttagaccgggcgaattcctcccaaaaaaaccttgccctcaggtaggttacccatgaaagaagggggcctggccgcggctctttccgttccaggaggcagacagcggagtgctgaggccgtgtccccgtgtggtgaataaatgcccgggagggcgggctgccttcagggctcctctctccgctcatctccgcttgtgtgcgggctgcgcctccgtgggctctcgctgcgtggggggaaggcggtctcagcagccctcggctgaccagtcatccccaagaaccctgctggcatcccagggaacagacagtgtctttcctggaagttctggcaaaagccctgggaggactccggggcccccacggatcacaggccctgacctgattggctagaactgaggcatggccacccttgaacctgtcattatggccagagagagaggcctctgattggctgtgactaagtgacgtgtccatccgtgaccgtagcactgtggccaggagacagaggccttttgattggctgtgactgagtcacgtgcctgtctccgtagcatgggaggcgtcagctccccttttagattcagaggcttgggttgaattggtgcagactgggagaaaggaggttccctaaaggaaagggagatggaacagaccaaattatcacatccataacgatgagaaatggggtttattaatgtgccagcatctggtctgagtggtttctatgtattgtcttattcattcttcgggacggtcctaggagttaggtctgcttaccgtccgcagtttacagactagacaactgaggggcagtgtcaagcctgttgccccaggttacacaggcagtgagcgatgggctgggattcaaaccaaggcagtttagctccagagcccacactgacactcacagctaccacgagatcctccctcccggcaagccatagctttacatcctgtggataagcattttgagactaagaatcaaagtgtgccagcgcagtggttgtgttcatatccccttgttgcctggcgtatctcaagagaaatcctttctaggggggatggtgtcttagctcctctacaccaggtagactatagtcatcccttccctgcaagttgctgtccttcccaggctctatcgccctcttccctgtttcccacgaactcatccgactgtgtcccgtgcagctgcaacatcgatggcctagtgttccgtgctccagagagcctgagacagcatgtttcagtggttccttcgagtatcttcctggccagagagaacttcttggagaggctttagcatcactgcaggaagaaccaaaagggaaagggcccccatcccaactccagcatgcccttcttgttttcagaggagaacacagaggcccagagagggcaagtgaattgcttgaagtaacacagcaaattgttggctaacaccatggtctctgggcctcttggtgggagtcttgcagtatttcctcttcagaaccctcttggctattgagtgggtaagcgcgggtgacttcctgtctctgtgcctttagtgcctaactggaaaagtcagggttttcataatttgaagcatcctaagactgggcttttctccagttgggcaaaaatgatttttaaaaactgtatccattaggatgctttgaattagaagtaatttctaaaagtgttcaaactgccctaaacaaggagaatgtgttgtctcataaatcagcttttcagatatggtttgagctacaggcatggtttgatccagagattcatgacatcaccagggcaccaactctacttcttctaatttcccagctctcacctccttgatgtgtcaggctcatcctcatcgcggcttttcttgcagtgtcaagaacactgctgcagcacctggcttcacacccactcaccatgacctccagaggaagagagcacctctgctccagtgttcccagggagtctgcagtccactctgattcgactggcttacattacaggcctgccacccttatccagtcactgtaatcagagaatgtgatgtgcttaatggccaccaaggagatggaatcacagtccccagaactgctggcatgtccatacagaaatcagagcattggactgggggtgtggggtggggagtagaggctgggtcatcactggtgccttcttctacactgacgtctctctgagtctgtgaagaccatgaaatgaagaaggcgttctgagagtttgccagtcaccttcctccatccatctagggctctgagcccaggtgtgggaatgacaggaaggccctgcctggccttctcctgggtctcatcacattcttcttttcttgtctccagacagagattactgcagtttatgtgacaagcagccaatcgggaggctgcttttccggcagttttgtgaaaccaggcctgggctggagtgttacattcagttcctggactccgtggtaagttcctgctcctgagggatggtcctgtggtcctctgtgatcagtgattgttttggctcaaaggaaaaaatagatctcatgggttagaagactgaggaataaactcactgcttacaaaactcccactacagactttgattaggaatgcaaaattgtctgaggatctaaacacatgggtgaccttgggtgaccttgggtgggccccctcccctctggaccttagttgctattgctataaagtggagccctatcagctctttgattctggaagcctgggttattatgggaggcagtgcctggggaagttaggcctagctcttggatctcaaggccccttcctccagctgagaacccattttatagaattccaaagcttttgtctgtttgtacaattgtttattgtctgcttccccattagaatgcaagctccctgagggcaggaccctgggcttcctgttcatacctgcctcacacagtgcccagaatctatgggcactcaatacatgtcaaatgaagcacatggctgtcaagccggtctgacaccaatggctccactgggctctggcatggatgacatgcctgacaccatggagtcttccttcacatgtgcttgttattctttgtttaacaaatgctgattgattgcatgggcttttaagacaggttgtgggaatagtcaggagttcctctgcacctgcccggggagcctgggcacctcggttcagccaactgcccttgggtttctatccgaggaaggaggacaagagggaaggaagaggagtggagagcggtcatgaagggtgtgaagtcatccaggcccctcccctccccgccaggtgcaggggccgagaggctgctgtttcctgaagggccctcatgccaccattggctgcagccatcccgacctctatctcagtttgggggacaaccctttagggtttcaagtctctgtatctgcttcaagatctcgatgtgcatctctagacccacaaaccaaattgcccactggacatctccactgaagtcacaaaggcccccttaaagtcagtaagtcccaaatgcactcaggactttctcccaggaccccaaagctaccagccctgagacattacctgttccagtgaccagcaccctatagtcacccgagcctgaaatctttgcactctttgatgccttcccctcctcgtccttccccaacctgatcaggctcatgtgcttggctccttgaccctgcccaggccagctccctcccctctgcaggctctgccttgggcttaggggaggctctgccttgggcttaggggaggctctgccttgggcttcgggcaggctcttggcgcctcttgtgtgagtgattacagtagttttcaatcttagctgggcgttagaaacacctggggagccttaaaaacacaccagagcctgagctgaagcccagaccaattaatttgaatctctggaggtggggcctagtattttaataactttttattatggaaaatttcaagctataaaaagtaaaagtcgacagaatagtgtaatgaacccccaggcacccttcaccccacctttatgaacccacaattatgaactcatggccaatcttctttcatccattcctccatcctttactctgtaacactttgtagcaattttcacatattatctcatctgtgaacttttcattatgtatctctgaataagagctctttaaaaaatagtactatcacagcttaaaaaattctttcctatcatcaaatgttagtattcagatttccagtgttctcatacattttatgtgtatttgtttgaactggtctggctaaggtccacacgttgtgatctgttgatgttttcttgactctaggctcccccataaccatccatccccctttgtaatacatttgttgttcctacagaagagcttcccacagtctgaattttgtattcttatccctaaatgtcatttaacaggctcctctatatttctttcttttttttttgtttttgagatggagtctcgctctgttgcccaggctggagtacagtggtgcgatctcagcagactgcaagctccgcctcccaggttcacaccattctcctgcctcagcctcccgagtagctgggcctacaggcgcccgccactacacccggctaattttttgtatttttagtagagatggggtctcaccgtgttagccaggatggtctcgatctcctgacctcgtgatccacccacctcggcctcccaaagtgctggaaccacaggcgtgagccaccgcgcctggcctggctcctttatatttcttatacgttgctagttggatctagaaacttgaccaaattcggtttccgtttttgcagggtggagtgggattcgacttcctcagtggtttcatgttcttccatcaggggacatacaccatctggttgtctttctttttgaaatggtagcagctattgctagtctgtacctgaatctgttaattaacaagggcttgcaacatggcaacattctaattctgccattccttcttcatttgccaacagaggcacttccttttgatgaccatgtggtgacccagtggtaaagttcatagaggaaatggttgattcttttctcgcattaatgtttctaaaataccaaactggttcactaccatcctccagtagcagtaactatttttaacttgtggttttaaacatgttgcgtgtgtattgttgcactgtagtcattatcctgactgatgctcatcgtctcatcagtggctagtgggggcctctccaggttggcttctgagtccctggctgggctccagcagttatcagtagtctccttgctgtctgatatgacgcagggttctgggctcatcttgtactagatccattgtttctcagaggagctgtgattccttttactgggacatagcagttgcaggccacagtttggcacaagggttattaccactaggccatcgattctagcacctattggcatttttcaaagctcccaggggtttaatgtgtatccagggttgggaagtaatgacatctaggataaagtccaggttccgaggctgacttaccagatcttccagcatcagctcctgcccaccttttcaccgttggccttcccggagtctttcttcagctctgtgttctggcccgaccacccacttctggcgtttctgacttgccaggacagttcaagcctcttggccctagctccctcaggcctccctgcctgaaatcctccccacagtcccatttgcctggcaaatgcctacttgtccttctgtcccctgttctcagaggccctcccgatctccctcttcctctctctcctgctgtgcccctctgctgtgggtgcttgcttctcacatgcacctgagccacactgctgccccgtgctggcagaggtgcatgatgcagagtgcagcctccagagataggatgccaagacaaaatggctctgccaccatctgttggtgagaccatgggcaggtgtttaacccctcgtgtacttcgtgtcttcatctgtaagtggggatatagctgtatctgatgatgggcgaggtgttaggtagagactacatgagttcttaccgctcacaaccatgtctggaatagcactgaggctcagtgaacctagccattgaggggtctgtgtgcctgttcctccactagccagagcctctttgtggcacagacgtggcccatggtctgtgaatcctcagcccacagtgccacacgtaacagttgagtgatgctcagattgggcccagtggaggttggtggcttgcctagagtcaaagagcatgtgaggggcagaggtaggcccagaacccaggtctcctggctcccagtccaggctccttcctctgcatcatgctgcctctgagaccatgagcatcataagccaatgacatggaatgttcgaaggtgagaactgggatggaaaaacaactggagcaggttaaaggaggttgggagtttggatatggggaggctggttgtatcatgaagtaggatggtcagcattggagtctttgaaaaggcgacatttgactgaggaccaggaagtcgttggaggagttagccaagtgaatatgtggtgaaagggtgttacaggcagggaacagccagcacaaaggcctgaaggcacgagtgtccgcagttggaggggagggaggaggggcagagggggtaggagaggaggtgatcatgtaaaactttgtgccatcagagaactttgactttgggtgaaatgggggagccactggagggtttttagcagagcagtggcatggtctgacttggggttttattttattttattttattttatttatgagacagggtctcactctgtcatccaggctggagtgcaggggtgggttcgtagctcattgcagtctcaacctcctggactcaagtgatcttcctaccttggcctcctaagtagctgcaaatacgggtgtgcaccaccatgcccatctgtgacttaggtttttcaagaatccctctggcttccatgttgggagcaggctttgaggggctgaggtgggagcagggagatctgctaggaggctgttgcagcagtccaggtgagagcagctggtggctcaagccatcttagtagcccctggcggtggtgagaagtggttggatttgagacttgtgtggaaggtgtattctctgatggattggggatgagagaagagttaaggaagacttcaaagttttgacctgaacaaatggaaagatggagtaaggatgaggctgcaggagggtcaccttgtggggaaaatcaagagctccgttttaggcacacgcgccttgggatgtccaccagatccttgagtggcgaagctccaggggagatgggtgttcaagccaggcttcatgagaaagatctgggctggaaatggaaaattgggagttgtcaactttttttttttttaatttttatttttgagagtcttactcggtcacccaggctagagtgcagtggtgtgatctcaggtcactgcaacctctgcctcccgagctcaggtgatcctcctgcctcagcctcccaagtagctgggactacaggtacacaccaccacgcccagctaatttttgtattctttgtagagacagagttttgccatgttgccatggctggtctcaaattcctgggctcaagtgatctgcctgctttggcctcccaaagtggtgggattacaggcatgagcctccatgcccagccttggagttgtcaacacatatatagctggtgtttagagagccctgggctggaggagctcaccaaggaaacaaatccacgtggatggagaagcgtgaggacaaaagatgccccggaccaagggctgctccccatttggaaaagaggaggcagcagcagctttgggagccatctagagagttgatgaggcagagcagagtgaggctaagcctaggagtcggtggaattttccagccacgtgttttgttagacacttacagtcagtttgaaaaggggggaaaaaaatccaatggatgcccattttcattctggtcgtgccatcgttccctctctctgggcctgtaccaagagctgttttttggaaaggaaatgtgagtctggctcctgtgtcagcacgtcaaatgctcttcacatctaccctaatgaagctgccactcacgaggggccgacccgctcccttctgcgttttcatctgcatccctgggaattagcgagactttttcatcgcccatcttgacgtcaaatgaccagcctctggaacacctcttttacgcacggagactttattgagttttccagggctggcgtaacttctcgtctaaaatccgttttttcttccatcctgactggaacccagaggagggaggaggtggcggggtccttggtgttgcagtagcgccccgggtgctgcctgactcggccagcgccatccacgccattcccatctctctgttgaatttctaccaagtggagcttttaaaaataacctgtcctcgttggactctgatgtagtccctgggaaaggctcctctcctgcacagtatttttttttttttaatttgagacagagtctcactgtgttgcccaggctggagtgcagtggtgcgatctcagctcactacagcctccgcctcttgggttcaagtgatcctcctgcctcagccttctgagtagcagggattacaggtgcgcaccaccacacccagctaattttgtatttttaatagagatggggtttcgccatgttggctggtctggtcctgaattcctgacctcaagtgatccgcctgcctcagcctctcaaagtgctgggattacagacgtgagccaccgtgcccggccttctgtgcagtcttaatgtccacatttctcaagtcaagtggaaggctgcagctgttttttaatgacggcccaggtgattttctgggcagcagaactgtttgcgcgtcatttactagactgcagggggagtttggcctttggtgttggttatcaagggtcttccaggaacctgagaaagacttttctcctgccactgccacctgtcctctcagcaagaaatggagtcagtgacctaagccatgactaggtctggtctctaaagggcaaagagtttgcccagctggtcaggggattgaagagggtctaggctagtgtcagcccccacagggcaaagagtctgtggcatcttggagactgatggacttctctctaacctgttccctgggagccttgaccacatgctggctcatttgaaaccatcttatctccacacttgggtgagacttaatgggttcaggtctcttctctttgggattgagggatgtttggcagatatggaaccagattcacccagggcacatttatggggtggctcctgtgtgccaggctctgttctagcagttgggagaacacaatgaacaggagaactaagttcctgcccttgtgcagcttgctttctggttaaatgaaagattaaaaaaataaagaagattttttttttctaggaggtggaatctcactctattgcccaggctggagtgcggtggtatgattatagcttaccgtagcctcaaactcttaggcccaaagcgaatcctcccacctcagcctcctgaatagctgggactacaggcgcaggccaccatgcctggctaattaaatttttttttttttagagatggggtctctctgtattgcctaggctggtcttgaacttctggcctcaagtgatgcttccaccttggcttcccaaagtggaatcatgctggattacaggcatgaggcactgtacctggccaaggaaaattttgcagtgaattaagcaacaccagctacaagttaaaatatttgttcagtattagctttgggttttttgttgttgttcttttttgagacagagtctcactcttttgcccaggctgcagtacagtggtgtgacctcagctcactgtaacctccacctcctgggttcaagtgattctcgtgcctcagccatcctagtagctgggattacaggtgtgcgccactatgcccagctaatttttgtatttttggtagagatagtgtttcaccaggttggccaggctggtcttgagctcctgacctcaagtgatctgcctgtcttggcttcccaaagtgctgggattacaggcatgagccactgaggcccacacagtattagttcacctcaaaatatagtggcttgaaacaacagtcaacctttattaggtgatggttttgtgggtcaggaatttgggcatggctttgcgatgtgctgttggctcaaggtctctcatgaggtgagatattaagaagttggctgggctgcagtcatctgaaggcttgaccgtagctggaggatctgcatccacagttattcacatgcctggcaggttggtgctggctgttggcaggagggagcctctccatgggattgcttgagtgtcctcacaacatggctggctttctccagagcaagcaatccaagagaacatggtaggagctgcagtgccctctatgacctagccttagagcatctacaccatttccctaatatcatactggtggcactggttagccctgtttcatatggaaagagactttcctagagcatgagtaatgaggcaaggattattgaaggccaccttggaggcaggcgactacaaatatgaggttacaacaaatgaaatctcatataggaaatgctaagaggcattcctatctgctaagtagcctagactctaggtgatgaaataaaattagtgggctatcacctggctttagatgtgcctgaccatttgaaattttattgtgaaatgatccactctgcctcactgggggctaagtattctgcttctcttgtttatgagaatccagtatttgtctttgtctttctctcactggtgtgatcccccaaaatgggaagagtggagggtgcttatagtttttcaggtgcacatagagacagtcagaacatctaggaagccagaccccgggagcagggctgtcttgaaaaagtgccacttctaaaatgggtttatatagtgcacatctgtgggatcatccagtctcctgggtgccccacccgcattcccaaataacatggctgtcctagaagctgccatgttcttaatgatgtcacccccaagctgcagttgactggagcaggagggggtctgtgagccaaggcaggccaacgagtcctttccctggaattgatggcctcaaggggaagttcttccctgctagagaaagcttaacataaaaaccctgggaactgtggactgccatgtttcctacactggaacaagccagtcagcacccagagatcatgagcaacacacacacacacacacacacacacacacacacacccaacacacagatcatgggggctacagaagtgcttgtgtccctggtctctgggctcttggcccagctgcttttctgatttccccacaatttgtttgttcagctcatcctcagattccaggagccaggagcttacagttttgttgaactaggttaggctgggattgttttcacttagaacaaaaagagtaatggggaaagttaaagacctttcctggtagcctttagatccttggttggatgcagagacagagaaacaattctgagagggaaggaggaaaagcagctggtgggggtgaggatgggtggagctcttaggagaaaagtgatggggcagacaggaagcaggatggcacagcccgtctgtattagtccgttttcaggccgcttttaaagacatacccaagactgggcagtttacaaaagaaagaggtttaacggactcacagttccatgtggctagggatgcctcacagtcatgatggaaggtgaaaggcacgtctcacatggcgggagacaagagaagagagcgtgtgcagcagaactgccctttataaaaccatcagatcgggccaggtgcagtggctcagcctgtaatcctgtaatcccagcactttgggaggccaagatgggcagatcatttgaggttaggagttcgggaccagcctggccaatatggtgaaaccccatctctactaaaaatacaaaaattagctgggcatggtggcgtgcgcctgtagtcccagctacttgggaggctgagacaggagaatcacttgaacccaggaggcagaggttgcagtgagccgagattgcaccactgcattccagcctgggcaacagagtgagactccatctcaaaatctcaaaaaacaaacaaaatatcagatctcgtgagacttattcactatcccgagaacagtaccagaaagacccaccctcatgattcaattacctcccaccaccgggtccttcccacaacacaagaaaattgtgagagatacaattcatgatgagatttgggtggggacacagctaaaccatgtcaccctctgccactggggtgcttatcacttcccctgagatgggcgagcctgtcccctccctctgagagaggcgagcctgtcccctccaccacgtggagagatgcagccccccttccctcctgccttctcttcagtgtttgactctggccaggccacaattcacaagctggtggctgtggtacctcaggaaatctggagttgctcctaccactttcattctccacccaatgtggacaggagtccattcttccctcccttctcaggttccatcccatctattgccctaagttgggccagtgaatccctcttgactgaggcctgagagggccgctcagatgggagccggagccagagactagagaacactttgcccaggcgggcacaagctctggggttgaccaggtacgtctgaccctggggcccctgggggacacccccatcatgcactgctcgccattctcactggggagcagaaaggaagcaaggccagtgcccacccatctgaagcaccgtgcagggcatcagccaggtcctggcagaaaacagatggccggccccatgtgtgaatggaggagtttaatgagggcctatttacaaagcgtgggagggaaatcagtagctgctgatgcaacacccctgagcctccaccaccccgcaacctgcagggccaagggaagggactgacgcgggatcgtgggagaagactgcccacaggagtcgggtctggagaagagggtccgggagcctgcggtgcccaggcggggacggagccagcagaaaaccaccccaccactccacccccacagcagggtgggagagggctagaggggctctggaggggcggcccacgtggtcagcacacacgagaagctggggccgtgggggtggatgcaggtgtttctccagcggggtgcatggtgagcattgtgctgaccaggcgtgtcacttgtccctgcctcaaggactctggaaaagctgaccacatcaataattacagaagctggaggtggcaagacctcatggcatctctgacttcatcttcctgttagggcagaagaaggtctcctgggagaaggaggtgacatctaaagttagtctaaggccaggaggaattcagcccagactgccctttctaaacctagggccggcttctttgaaaacgtggcaggttcttaaaagcatctgaaggaaatgtgtcttcatagccaggacatatttttcctggcagattctgagattgatgatgcaattagggcaggccaagagaatgaagtattagggctataaactaagatgcacatagatgtttccactctttggaaggcacagatgtagaaataattctttgttccttaagctcaatgtaatagtctgcattttgtgttagagcagcatctccccgcaaaggccacccctgtgtttggcataaatcacaatgcagggagaaggctcattcagtggtgtcttccctgttggcacctggcacgtatctggattatggattgtcatgggtgctccctggcaccgtggctgttagacctgagttctgggcagggagagctccaggctggagtgcaatggcacaatctcagcttactgcaacctctgcctcccgagttcaatcgattctcctgcctcagcctcccaagtagctgggattacaggcacctgccaccatgcttggctaattttttgtatttttagtggagacggggtttcactatgttgggcaggctggtctcgaactcctgacgtcaggtgatccgcccgcctcggcctcccaaagtgctgggattacaggtgtgaaccaccgcccctggctaagagagctttaaatgaacagaacagcagaggtgcctgtgtttcggggaggggacaaggcccatctctctctctctggttggaagggactctcttgcagatggaggtcacgagggcactctttgcatacagtttacctttcttttcattgaaatcattggctgctatttcccaagctacatctaattgtaaaattctgggttgttggcacactcttacttgctgcttacgtttgctggttaagctggtttaagctttctcccaccagctgggcaagggtgttctcagggcagtggtttccagggtggccccagccgtgtggagtgtgatctgccttgagctcggcccatccaggggagccaccatggtacctttcctctgtaggtggcctctcaggactcccctcagggggccactgtggagacatggcctgtcactaggtgtcttaatcagtgcgaaaagcccagctggaggccttccatccgttttccacctcccaacacaaatgctcttcaagtggtggcctggcacggactctttgagaaaggccttttgatcccggcaggggaggcctgtccccgcgtgctccctctgccgccctgtggacctgcgtgcccatccaccggcggggcctctgccgggaggcaggtgacctgaaagggatgttatttttttaacgtgggttttagtacccacagcaagagtatttttagctggttattgaggctgattagtgagccccaggcctccatttggttaaatagagccaccttcacagatgtattttcgtacagtgcaaatctagtgttctggatggtatagagttaccccaaatgatggccggccatttgcccagggcctgcgtcctgcagagcagtctagctacattcccacggtgccggaccaacggcgggctgtccaggggcagcaggaccctgggtgcttctcattctggaaaacagcaggcagctggctctagagtgctcagcccctttggagacgccactgctgccccgtcgcttgctagctgtgctgtattggaacctcttagacccttagtttcttcatctgcaaatcgggactaataatacctaccatgtagatataataataataccctgccatgtagggtgagcctggaatcagcactccatatggggtgtgtgtctgtgtgtgggtgtctgtatgtgtgtgtgtaggggtgcgggtgtgtttgtgtggatgggtatctgtgggtgtgtggtgtttgtgtgtgggtgtctgtgtgtaggtgtgtgtgggtatgtgtgtgtgtgtctgggtctgggggggtgcgggtgtgtttgtgtggatgggtatctgtgggtgtgtggttgtgtgtgtgtgtctgtgggtgtgtgtgggtatctgtgtgtgtctgcgtctgtgtggggggtgtgtgtgtgtgtgtgggtatctgtgggtatgtgtgtctgtgtgtgggtttgagtgtgtgtgtgggtgtctgtgtatgggggtgtgtatctgtgtgtgggtacgtgtgggtgtgggtgtgtgggtgtctgtgtgtggatgtatctgtgtgtgtgtgggcgtgtgtgtgggtgtgtatctgtgtgtctgtgtgggcacgtgggtgtgtgtatctgtgtgtctgtgtgtgggcatgtgggtgtgtgggtgtgtgtgggtgtcggtgtgtgtatctgtgtctgtgtgtgggcatgtgtgtgggggtgtgtgggtacgtgtatgggtgtgtgtatctgcttagtgggcacgtgtgtggatgtgtgtgggtgtgtgtatctgcgtgtctgtgggcacgtgtgtgtgggtgtgtgtgggtgtgtatctgtgtgtgggggcacgtgtatgtttgggtgtgtgtgtgtctgtgtgtgggtgtgtgtctgtgtgtgggcacgtgtatgtttgggtgtgtgggtgtgtgtgtgggtgtgtgtgtgggtgtgtgtatctgtgtctgtgggcacgtgtgtgtgggtgtgtgtgggtgtgtatctgtgtgtgtgggggcacgtgtatgtttgggtgtgtgtgtgtctgtgtgtgggtgtgtatctgtgtgtgtgtgggcacgtgtatgtttgggtgtgtgggtgtgtgtgtgggtgtgtgtatctgtgtctgtgggcacgtgtgtgtgcacacatgtgcactcaggtttaggagagcgacagggggcacagaggaagaaaataacaggaaaaagtcaagaagaaagagccaccttaaagcatctcaggaattcatctctcgagtcaaatcatcaagaagtgcccagtccctcaaggctcatcttgatgtggaagaggagttgacctctggggagaggctctgcccacgcggcgcagtgggaatccagaggccagcgcgccagtccagcagctgtgaccttggaccttgggcaagtccctgacttctctgagcctctgtgtccagccctataaaatgaggggtgggattccttacagaaccactgccctatctccctgtgatctaaatgattgtagtgttcatgtttcttcatgggagaaaatcattggatcttggctctccattagaagagagagggcaagacaaggacactcgctcactgtggttggaaacgagcctggctgcctctgtggtcactgcgagtgccgcctgcgtgctccctttggctggcctgggaggaatcggaccctagacactgaggtgtgaagtttccctgagggccggctgggcatctgactgcatggtgggacgcctggggaggagttcgggtccgtctatgctggtgtcatttccttcctcttttgaaatagctgtacttttggacagaggctgacaaatccttgggtggtggattttgaaatggttataaacaatttgcaattagctcttttgtctaaatgagaaagggccgcttactcaggctttttattgactcgaggccctttatccatgtggcgagtgcgtcagatgtgagcgaaggagcccctctgggattcagggaaattaaaaagtctgttttttggagacctcccatctttagagcttgggccccctggcttggctagttatcagagtcctaaattctgtggtgtggttgaggagaagccctgcgcttggaggttcgagtcccagccctgccacctcccgctgcatgaccctatgcaagtcccttcccaccgccggccctcgggatctccacctacagacgaggggttgggatggcagcccctgttctcctgcgtcactgccctggctctttcgaggttcagataagaacatcttaaaaaacctgtgtatgttcactttgtaaactgaaaagctggaaaagaccaggcatccacattattgtttatccttgcaaggtgtaataatcacaatggcggtaactatagcaactgtttattattatttatgatgggccaggccccaggccaagagcttgatcacttccgtctgtataatcagtgtatacctaggtgctggtaccatctgcgttttatagaagggttaagcaaattgtctacgatcacacagcttacaaggtctgagtgacctaaggcagcttctcggcagccttccagtctggtgggctgttatttttctggtagtttcctttgattcatctaagtcagtggtcttcaaccccggctgcccaggtgccagccctcatggcccactggaaagcctggtttcatgggtctagggtggggcctagcatcagtgtttgctcagggctccctgctgattctgatgtgcagtctgcatggagcaccgccatcctgagacccagcatctgtgagagagggcaaagtagtttggactaaacatcggggctccgtggccaggtcttcccccccggtttcctgacctgcaggagaagggggttggtcaggtggcctctaggggatttcctccaggggctgtgaggttctgtaactataagaagctcatgagcaaacctgttattgttcttttttctccttctgttttaggcagaatatgaagttactccagatgaaaaactgggagagaaagggaaggaaattatgaccaagtacctcaccccaaaggtaaggagtcttccaaaccccacagcaggtggcacaggaggccttatgcaaaaataggagcccctaagtctgtgccaggccacatggggagctgttaagtgctgggctggtggctgttgttgacctcctgagatcacagttcccatcctcccccagagagtgcccaagcctggcagggccaagatggggatggtctaggccaggactggagtaggggcgggatgcctgcttcttggggcccagccccttcaagggtcaccatgctgctgtgtgcccacacccaaccatttgtggtagggcagatggaggcctggccaagttcaggagaagtgcccagaaggaagggcttagcagggcagttctgagaggtcagcgtggaggggaagtgttgggggttgactgggagggaaagggggtgcccaacgacatcaaagaatgaagagaattctgaaacatattctggagtattctgaagggtcaggggccaccccgaccccacctcggggccacccactggatagttgaagcatcggggtaccattgtcctcagggtccagcagcctcggttctccaagatctgcttcctcttgactcaccttcacagaagtgtgttctcaacccatttagtgttctagtgtcagtggttctgcccacttggtcaagccacattccctccctgggcctctgtttccctttcttaaaagtggccttcctgtcagactcacctcccggaggtgttgagagcctgagatgggacctgtgtgggaatagctttgcgtgtgtcccatcccccggggccagtggtggcttcaccctgctcaggaccctgtgggccaaccagctccccggaagagtatacctcctggtgcccatcccaggctgccagtggactgaggtcaccacagcctgtggaaggtcttggccatcagtcccctcaacctcctgcacctcttgcaccaaatgtagccctcgttcttctccagcatcagcagttggtagtggccattgcccttgcagggtgagaccagcctcacgcccagaagtgttgccctttgtcacgccccactctggacagcctgctagacggcattcctaatgcgcacacagtcgccatcaccttgttgcctccccttgctgtttctctgctgcatccatcataatccatgcacttctctttctgtgaactgcaaacacccccagcccttttgcacttttcagaaatgacagaatttatgtttataaaacacttctaggcatagaatagggctagtttgctctggacaaggtgtggccctgggtaggcacagctgcccccaccttgggggccttgctatgctccagatatgggcctgttgctgtctgtgaggttctcaggtggacacagacgaggagacgttctcagcagggtccctgttcacccagtcgcagccgatgtcatattggtggggctctggctagatacatttttgatctcctggccaccactcaagatagtgtggacactctgggcataaacacatgccctgagcttaaaggggtgcatgcaccctagagggcataatgatgacagctccctggctgggctcctatggtgtgccacatgcctccgagatgtctctgatgattcgcgtatccacgagattgccctatttacagacaggccactgaggccacagagctgaatagcgtgagaggccactctgctgaaggggtcttcagctaccctctgcagaggcatcttcccacggtggctcagcttggcccagtccagcgcttcatctgtgcccccatagggctacccagtcacatgtgtcccccccaaacaatggcaactagaatgtattgaggactccttgtgtcaggcaccactgtctatagtccttgctgtcactgtgggatgcagattatatttgttccatcttaccgataaggaaggagaggctcaggggagctgtcacatcccaagtcacacaactagtgagtggcggagctagaatttgaacccaagtctgggtgattctagagccctgagtgtttcccctgggtgtagtctcctcacccggcttcactgtcctgccactgtctgtggcctggctctgatctgcagtgagggcggagtgctccctttgcctgaccttgctgtctggataggctcttgtggcttagccaagaacagggtacaggcaggcactggggcagccactgagggctgccaccgggttgccccgtggccaaccttgtccagaagcccctgctggcagcccctgacctgagctctccagacctccctagctctgctcagccttgcctccatctcctggagggatggggcccagacacccccatcagctcagacggttttacaagtgcctcagagcctgccagcattttttcccttaagttctcctcaatttaaaaaatttaagccacaccatatgttacggccagggaggcctccaggggaggtggttgatccatgccttgggtcagctgtttccctacaataaactttgcactgctttcccagttcttcccataacagcttgctctggagcctcatttacctctcacgtgccccagtgccccagatgcagcgaagcaaggtgctggctgaggagctgagcgagtgactgaggccccagcactggctcagaagactttgaccaactgcaaagccactgtccccaagcccagattgtccttgccttgggacccctcctcagtatgtagcttgtgtgtctcagctctgagcagtgcttcccaaaaggtagaccataggagagtggccagtggagaagctctgtgaaaaagaaccctcagtggtcaattacacgtgggcagcactgtaataccatgtctcccccggtagattcactcagcatgtgagcatattcaaggctctgagaagtcctgcaagaaagaaacctctttaactgttaccaaagcatttctcaaagttattgaccataattttttttcaattttccattctgctgagcacactttgggctacagaacacatccaagagcctcacgcccacacctccttctgctccagcatcctttcctgggacctctcctgtggcttcacactggactgtggccacaccatttcctaggctcacctggatgtccataccttgtggcctttgttcaggctgtgccccagaaggccctttatgaaggcgctgtcccctactctgtctttctcgcttctgtatccctgcatgtattgaggacacttgtgtcaggcaccactgtctgcagtcatctccaacatccccagctgcacagagcctcttctgcctcttgtcagagtccgttggcctcacctgggtggtctctgagcacactgttccattgttgtgattctgtgccccatgatggggattctgaggagcccaccttcagagtagggccaacacataagcagattaaccaaatgccccacgatgggagcagtggtggagctgtgctcagggaagtgtggggtcaggtgagctagaggacgcttccaggaggtgatgctgctgaatcagatcttaaaggatgtggaggaggaagctggacacaaaagaaggggaaggaggagcggccttcatgggtgcagtgcagtgggcatttggggctatctggagatacttgtaattggcagaattgtgggggagggaagtgctcctagcatctgatgcgtagaggccatggatgccgttgaacattctagagtgcacatggcagcttcctacccagagttacctgggggcaaaatgtcaatagggctgaggttgagaaaccttggcacagaggtaggaaagcgcacaggatgggcagtgctgtgggggtgggaatggggagggggcccctctgagctgtaggccctgggaagccatgttgaggtggcagcagtgtggagttgccagtgcttcgagtgccacttgtattttaggacgatctccctgaccacatggaggaggaataagggggatgaggaaggactggaggcaagaggccatctggggaacagccccaggtccccaagctgggccagcagccttggggatggggaggaacaaagggccttgcgaaacggcagaaggaggatgcccttgggcttttgtcttgagtctctgggtgtatgggggtgtccccaggaaagacagagcacaggatgagggccgtgggaaggtccacctgctctcggcagaggcaggggaattcattttggatggagacagtggcatctgctctctgtgtccccgccccagcatgacgctggacacatggttctcgatcaatgtgagttggttggaatgaaacactgaggggagctctggaagctgccctccatgggcccgtcagctctcctgtctcatgtctctggggagccacgcttggcgagctcacatcctgaggtgtctgccatcttaaaattgctggaagccaggatagaaagcccctgcctaagcaatgcctatgccttgagctccgttctccctcaccacggaggacgccctacaaacccgtgcctgaagtttttatctcaagaggcaaaccccactccgtagaccctgcctcgaatcctgcatcagtcgcccatacaaggccagctttgctttgggggtgttacagggcaacagccaagggtgggcttggaaggggttgaaagctgttggagagctcacagaagggcagcagagtgctgagaaggacgtgagctttagagtcaggtagacctgggttcaaagccagatgtcacctctttgggctgcatgggtttgggaaagttgcttaacctctcagtgcctcagtttcctcatctgtcaagggtgtgggccatgatgaggatcataaataaaagcagcaagtactgagcatggtagctggggcatcttaagtgcccagcagcagtgcttgtcatctgcctttccccaccttctccgtgccttcaaagtcaggctgttgaatgaggaaatcgttcagatgtcgaactgccagctgtggagtgcgagaggccaaggaagggtcgggagggcctccagctgcagagggctggacagaggcagtgagccagtcaggatgatttatactagctgccacaacaaacaaacccccaaatctcaggggctcctcccagcaaaggttcatttctttctcacgcatcatctggttaggtcatcagctcttctgggtcctccctgggtgactcagggatcctggctgctcctgtggccccaccatctggagtgtgttgtcccatggtcagtgccacagaggaagagagggatgaaggaggcacagaagcttttaagtgcttgacccagaagcaacactcatcacttcctctcgcagtccatggccagtggggaggctgggaaaggcagaggagcatctggaatattaggtgagcacaccagtaaggctccctgcgtacattcccatccctcgagccccaggttaaaaacatcacgtggcaggctcatctctggtgctgattagacagccgtgagcgtggcttgtcttagggattgtctcgggtttgtcagctcacagaagctggccagcgggccacagttggatctgagtgtgtgctgggctctgaagagagctgagcagctcaccttctaccctccagttctacagcccagaagtgatacaggtgacaggtattcaggagaggggagggtcactccgagctgaggtggcccaggaaatgttcccattgtaataataataataagtgaaaacagaattatatttcatccagcattacagatgactttttgaaataccaattttatggccgggtgcagtgtctcacacctgtaatcccagcactttgggaggctgaggcaggcggatcacctgaggtcaggggttcgagaccagcctggccaacatggcgaaaccctgtctccactaaaaatacaaaaaatcagctgggcatggtggcccacacctgtaatcccagctactccagaggctgaggtacaagaatcgcttgaaccagggacggggaggttgcagtgagccaaggtcgtgccactgcactccagcctgggtgacagagcaagactccatttcaaaacaaaaaacaaaacaaaacaaaaataccaatttttttgagatctattggtataattctcataccatagaactaattcttttaaagtacaattctatggttttaaaaagattcaaaatcttataaccatcactgctttctgattccagggcattttatcaccccaagaagaaactgttgtacctgttagcagtcactccctgttcccctttcctcccaggccctgacagccactaatctactttctgtctccaggcctatttcagacatttcatataaatggaatatcatataatatgtggccatctgtgactggcttcttttttttttgagacggagtctcgctctgtcccccaggctggagtgcagtggtgtgatctcggctcactgcaagctccgcctcccgggttcacgccattctcctgcctcagcctcccgagtagctgggactacaggtgcctgccaccacgccctgctaatttttgtatttttagtagagacggggtttcaccgtgttagccaggatggtctcgatctcctgacctcgtgatccacccgcctcagcctcccaaagtgctaggattacagacgtgagccaccgcaccagccgactggtttcttttgtagcataatgtttttaagattcatccacattgtaacatgtatcagcacttcactcctttttatggctgaatgatattccattgtaaagatacaacacatttatttagttatctgctcatcatttgatggacacttgtgttatttctacctttttgttgttgttgttgttgttgagatggagtttcgctcttgttgcccaggctggagtacaatggcgggatctcggctcactgtaacctccaccccccgggttcaagtgatcctcctgccaccgcctcccaagtagctgggattacagatgcccatcaccatgcctggctaatttttgtattgttattagagatggggttttcgccactttggccaggctggtctcgaactcctggcctcaagtgatccaccctccttagttttccaaagtgctgggattacaggcacgagccaccgtgtccaacctgcttctattttttgtttctacatttttgctcttgtggaataataatgctgtgaaaatgcaggtacaagtttttgtgtagacatgtttcattggggtatatacataggagtagaattgctgggtcatgtggtaactctatgtttaaacttttgaggaactgctgggctgttcttcaaagcactgtaccattttaaattcccaccagcagggttccagttttgccaaaacctcatcaacacttgctattttctgtgttttttattttatccatcttagtgggtgtgaagtggtgtcttgatgtgattctgattcatacttccctaataattaataatgttgaacaccctttcttgtgctttttggccacttgtgtaacttctgtgggaaatgtctattcagattctttgttcatttttgaattgggttgtttgtctttaatgtcaagtcataagagttcttcatatgttcaggatacaaggtccttatcagtatatgacttacacatattttctcccattctgtgggttgtcttttcactttcttgatagcgtcctttgaatcacaaaggtttttcgttttgatgacattcagccttcatttttgttacttgtttttaaataacttgttttcattttgtcttacctgtccttgtaagaaggcctcagtttttgaagggaaagggtgtgtatggaaacaaagtaaagaaatcctaatgtacatttagccccatgacccggtcttcctttgaagaacgagagccccactgcctgttggaaagatcagggccagggggccaggcctggtccttcatggacattcagccccttatcccctggttgacatgacaacatcccaggggctttgagcccttccattcctaggactgcacgggcctcttacagacttgctcctggaacttcctggcagctccccaagatgggtattagtgtacccattttacagatcaggtaactgagatttgggaagagaagaggctggtccagaatggggaagcgcctgcgtgacctgctttggcagtgttacttgtaggacattttgctgcggctcattttaattgggccggtgagcaacagtgctgatctccatggttgcagtgccccaccgcaattactaaggtctggcaaggggggtgccagttttgatgtggctttgttagggactatcagtggattctaggggaagctcaaacccagtcctggtcctgctgaaagggcctgcgtgggttcttcccggacaagggggtggacaggtgggttggggcaggcttctggggaactggtatggcgtccttctgtggggtactgggaaggccgttgtgcaggcagctcttagagcgcatttcttgccaaaggtctgcaggcaggatattgttctctgggccctccatagatgcagggctgcctctttgtttcaataaacaatgatagggtaagacagggaagttggttcttgtgaagggggaagttacccatcagcctgtttccacacaaacgaaatctattcgtagtgcttgttgggctctctggaaaacatccacattttataaagtcaagagcttgaatgaaaggaaataataacgactccaaattccctcctctggctccccacccccacccaggcaccagcgtcaggaagccgaacaaacccacgcaggctgggccacggctcctcggcctctggcacaggcagtcagcttcatccttgtccccaggacctcatgcaaccccagtcctgccactttccagctctgcatccttggagcctcagtttccccaactgagtatggggctgataaaaatggcgcctacctgtgcttgtggccatcagtcattctctagcacttgcgtggttttggccatgtttgcagactacccttaacagttacctatacaacgattttctttaaatcaacttatcttttaacttaaaatagatgcgttttaaaaggaaaccttgtaccaggaacatgcctggagaaccagtattgatttgtcatacataaaggtaactggaaaaattaagattaaatccaagctagatactctattgtctgcctgaggttctgagcctgaaggctttgtccttgtcattttaaaggagattagtgaatgtgagagccctgatgacaggacggtagcactgcctgcgactttctacttcatgatggaaggcttgcaggagatccaaagagaatcactttttcaccgagtgattcaatattatctaattgtgtccctgtacttcctaagacctctcatcatctttagaagatgctgggctaactctctgcttcctagctatgatgcgttatggaaatggaaatgctggcttgtttttgttagagacagcatgacctagggcaaagagcactggactgggagtcaggctcattcctgatctcccttcctggggtccatggccctggtcctgcttagagtctgcctgatcatccaaccaattcatgatctccagggcaaccaagggtgtgaaatatgggaagcttgggcaaatggctcccttccaagtacctgtcccattctccctggggcttggggtcccagacactggccctggacccggctcttcatctctactgagattgcccggccctcatttcccagtccccggaacaggtcatcctgttgtcaattaatctagtgagctcagactccaccttcacttgagcagagggtctggctgggcagctgcccctgctgggccatctaccagcatttccagcttcctgtcacagccttgcgtacaggctggagggcggaagaggattgaaaagaaaacttgagaaagggacttccaggagttttctcaagcaacagtagtgagggacaggggttgggcctcttccacttccacttctgggagcagcagagagaggaattcacaaatcaagccacatgtgtgctcatgagctgtcttgggacagctagcatttattgagctactactgtagcctagaacttcatattccatgttttgctaagtcctcatcacagccatataaaataacaagaagtggaggctcactcaggatgggcgcccagggaaatctcaggggctgcccagttctgggccccgcacgcagttttatctgcagattcccagcgtgcaaacagataaaaagatctgtggttgacaaagctgggggctggacttctctttttcctcccttccgcttccccttccccttccccaggctctgactttgaggagaacatttagggttctgtggatcccagtttaagcaccatggagctgagctaaactcctcatttcctagataaagaaactgaggccccgagaggcccagcttggaagaggagactggaatcttccttgtggggctttctataactctgtgctagaaacaaggagaggaggcctcaaaagggatgcttactgacttggttttccttctcccactggggatggccggcagctgggtttcaattcctctgaggtgctttttctttaagccagtaagtgtctaaatgctgagacattcgtaatgtctgtgcaaagcagagaagttggctgttgccggaagttctactagttaagcactaagtcattaactctctgggttttagtggaagaggtgagagaaaatagcattaatttagcacctactgtatgcgacatgctttatagctttagtgcattctatcttcatgactatcctatgtagtagacactattgtccttgttttacccaggcagtcagagttctttagctcataatggtaaaacaggggaattgaaaacagggaggctgggcatggtggctcatgcctgtaatctcaacactttgggaggccaaggcaggaggattacttgaggccaggagtttgagacctacctgggcaacacagcgagacccccatctctacaaagaaaagaaaacttggggggctgggtgtggtggctcacgcctgtaattccagcactttgggaggccaaggcgggcaaatcagctgaggtcgggagttcaagaccagcctgaccaacatggagaaaccccatctctattaaaaatacgaaattaaccgggcgtggtggtggatgcctgtattcccagctactcgggagggtgaagcaggagaatcgctcgaacccaggaggcagaggttgtggtgagcccagattgcatcattgcactccagcctaggcaacaagagtgaaactccatctcaaaaaaaaaaaaaaaaaaaaaaattaattaggtgggtatggtggcgcatgcctgtagtccttgctacacaggaagctgaggtgggagaatcacctgagctctggagttcaaggctgcagtgtgagctatgattgcaccactgctctctatcctgggtgacagagcaaaaccctgtctcaaaaaaaaaaaaaaaaaaaaaaggcagaaaacacagatgcaaacagatactagtgtgcaaatatttatagcagcattatcacaatggccaaaaaatggcaacaaccaaagtatccatcaacggatgaatggataagcaaaagtggtctatcactacactgcagtgttcaaccatataaaggaatgaagcgctaatacatgccccaatgtggatgaaccttgaaaacattatgtgaactgaaagaagccagacataaaaggccacatattgtgtgattccatttctatgaggtatctagaatagacaaatccatagaggcagaaagtaagttagcatctaccagggggcacgtgggagggagggagtagggagttgctgcttaacaggtacagagtgtctgttgggatgataaatatttttggaacaagatagaggtgatggttgccatgatgaacgtaatgaatgccactgaattgtacactttaaaatggttgaaatggtgaagtttatgctatgtctattttaccacaatgaaagaaaaagagcaagaaaagagtggaatgtaagctggcctgtccgatgctggagcctgtgatctttctcttcctctgcgttgtcttcttgaaagttaaccaaagacaaaagttcccactgaatcagcttcccaggtgtagcagggggcaagcagcaaggccggggaatgagcaagccccggaggcggtgtcgggctgacgtccagaggctgtgcatgccagcgccctccggggcccagcccagctcctgacccccaacctgggcctcggcttccactctgcgctgtgtccttagcatcttctcacgtcacagtctcctgcgcggcatatttcatgactgtgtaattgtccttcaaatagacacaccccacccctcaccaacctttcctggaaaacaaattgtctttgcccacagcctgatttcatcttggcgcctcctgacgcccttgaggctgatgtgccttgctggagctcctcacagtgggccagggcaggcccatctaggtcctttttcctttctcatgaccatccaggtcagaaaattggaggttcctttgatgctggcagagctggctctgcctctgaccctgtccttaatgtgtgtgcatagtgtttcctgtccagaatgcctctcttttggagtggcggcagacagaagactcagccacaggcttcctgagggcacccccaactctgtcctgggtggcagtgatcctggtccctgtggcttggcaggccctccccatccgtggaccttgggcagagaagtggcatcacgtggctgaggtgaggggcaggttctcttgaatttcctggctcgtaggagattcctgccccctgccccccaacccctttattttgcagcccgaagggatgaagtcttcactggagaaaaatccaacatgatttcggattgaggagggtggtgggtgttctggaagaaggaaagttggcgggccctgccctcgcctatcacgcacaaagaatgagggacactccccaccgtttccccaccgtgaacatccccagcacctcagggcctgggctccatgtgtcagtgacctgcatgtggttgcattggcctgagcggagctggctgcatgcaaaccactggccaggaagaatcccactcctgctgctgctcctgcagctgcgccgggtcccgcgagcccccgcgtgcgcggcctgtgtaaacagtgcgtcatctcctgttgcacactttgggcctgcgggtcacgaccagggattatcaaattgacagagctcagctggcctctcactccacgtccgggcacattgcattttgttaattatcgtcttttgcttttgacgtaaagggtcggggtctgggtcagggtcactgtgtattttcctttccttctcattaaagttgcccagctctcagggcccccagttaaattctgccagcgtttaaagatatcttccctcgcttcccgacccctaagcgcacttcttccttatttctgtgaagccactggaatagcaaaggaaatgtgggtcagggtctttcaaacccagtccattttatttttcttgaagggctgcagctatttctgaagggctgggtttttctactttgttggcccagagaacatgacacgctgggtctcaggctgaccaggtcagcagggcactgtgaaggggctggaaccacccccgacgctttgcagccccaaggcaaggcttgctcccagcacttcccagccacacggccctcacttggttgctcatagccctgagcctgctgtctgcctgtgatcctcagtgcaaccctaccatctgaaaggggtctagaaaagtgtcagttctgccattaggaaaagtgaattcatccagagctctagtcttggaagagttcctagcgcacaaatggcatgagctggaggatagaagggtcctccctattgcctggctaaaccccctttaccctttgggccatgatcaaacctctccacagccgtggagccacctgtgtctaaagaggccacctctgtgagcgctctctcctaggtgctgaggggctgtgacctgcactctacagcctgcagtccttgctgaccttgaactcctgccattggccaacagagttggtctctggggtccttagggtggacctcatggcctgggcacagaatgggcactcagggaacccgtatggctgatggaccccagctgaagaagctttccgactggtcactggagcagtggccccacctccacctctgctcacaaagacagctcccatgccttgaagtctcttcctggcctggtggaaaacccagctaccctcatggtcaccaccaaagaggtacaagagatcctcagccaaagaattaaggaggttgcaagagtggtggtgtgtgtctgcaccatgatggagtcacaggcctttcgtggatgctggttacttctgaacactgtgtcatggtgtcactcccactttctcctccgccagacacacaagactccagagagcccagagaccccttagactctaggtctttggactgttcaccaaggaaagataaaaatggcagactggatgccatcttcctaaaggcatcatggcctctggaagggccctggagaggcccctttgagagttggagacaagggaagatccagagtttctttgaggggggactgaagcttaaataacttgctgagcatgctttttaagaaaaagaataggaggttaggtacaaaagtgaatattgagaaggagaaaagaaatcacaacaaattactgagggcttggagattcatatccttttcatctgtgacctcaatttcccggaagtgcttctgtagaaatgctctgtctcccaagatagagcattctgtagctcccaggactacaaataaaggactactccgtctcaattaacaaacaaacaaacaaaaccctaaagcttcggcctcctcagcttcattgcagatctgcttcttttttttttttttttttttttttttgagatagagtcttgctctgtcgcccagtctggggtccagtggtgcgatctcggctcacagcaacctccacctcctggagtcaagcaatcctctcgcctcagcctcctgcatagctgggactataggcatacaccaccacgcctggctaatttttgtatttttagtagagacggggtttcatcatgttggccaggctggtctcgaactcctgacctcaggtgatccacctccctcggcctcccaaagtgctgggattccaggcgtgagccactgcgcccggcctcagatccgcttctgattggaggctgtgcccaccttcatgggaaacggtgagcatcaccttcctttgaactcaaaagaggcacagtgagagccttccagcctcgatcacaaggacctctacccacaggctgccggtccggtgtgtctctgcctggcagggctgtgcctggcacggtgcccgggccgtgcagtccatcgcctgggctgaccacgaggacaccccggtgaagagctgggcgtgcttgggccgagggctgctggatgttggcatcaggcccagggtggagggagggacaggccacgagcccgcacagctcgtgagcgtgtggccggactgatttatttttctccccagtgaccccgaaaaccaaaccctgccttctttcctttggtctgttcttgtctggggcttgtggatcacgtctcctgcctggccatggacagagaaaggaaccactccagacggacgtgagggtgtgtggcagtggcttttccacatggccctgaaggttttgattaaaaaggtggaagaatggtgctttttcttcctgtcagccaggccttaaatcaaccctcaagtgaggaaatgctctctgcgcctgctgctcagcaaacctttttctctggttgtgaccgtatgagcatgtttaattgcaagccagggtttagggttggaacagcccccattcgccccaccaccctctgctttccccaccccagaccccgtcgctgcagctgggtgagcagggctgagtgagctcagggaatcggagctcggcgagacgaggggagctcttggccgtgtgaagagcacttggaggcctcctgctcacctggcctaagcccctgattttacagatggtgaattcgtctggattcttggcagcaagtggcagatactttcctcccagttgctcaaacaaagagggaatttactgcagagatgaggaggagggcgttctctcctatggtcaaatgaaaccatgagaccgacacggcggtacctaggctgggaacccccgaaccagggcacttctcccccacccagcaaccctatcctacagtttcttcctgagatggccacggcccctccatctggttttaattaagaaaattccttagcactgtgattggcccagcatgttacaaaggcaggaggcagagcagatgaccccataaaggaccttctggtggacagacctgctattctctatctccttctttcctgctgtgaacgttcacactcatgcacacaggcgcgtgcacacacacacacacttatccaacaagcatattgagcacctactatgtgccaggaacatcatcagttcattcagcaaagcagagtggagagattgcagggtttggaactgggcaggcctggatttgcgtctcaggtctgctacttgctaagcgttccgtctgcgggcatttgcggaaccctcacagcacacctggtgccgtgctgcattccatcctgataagcaggaatgagaccacattcctcctttcacagagctctctagggctctgtttccacatctgtgaccccggaacagtaagcccccacctcacagtgttgttctggagagcaacaggagtaaaaatttatgagaaaacccacatcaaggcccagcacaacgcctgcctctctcaggggccgtgactgttaggccggcccgtccctcaggcgcccacagcagcctccagccctggctcctgctaaagacccgactcccacccctgcccccgcccaggccaggcttcccgtagctgacgcagatcccctcgaggagggtcaaggggcggccagggtatggttgtgggagtgcccctcctctgttcccgccccggaggagaaatgagggtggcctcccaagaaatgacctccaccccatgacagcagaacagggcagcccccttgtgtggaaggaaggggacccctgggagcccctttcttccagagagtctctctctcctgctcagccttcctgaaagctgagcctgtccacgttgggaaattgcaaatagtttacatggggaatgtcagctgcccacatatgaaaatatacacatcattaagccctaagtgcttgcgtctggagatagagtggacagtctcccgggccgaccttttgtccactgacggaaccatggctaatgagcgcggagctcctcagtgggatgttttcctctactgaagtgaagcatatgttggacgttagcgtgtgtgtgtgtgtgagagagagagacacatgacagcactatacaaacaccattggtcaaaacacacagagtccaccgcacctccttatccagcccccatgggcctccagggagggcttgttcctcaacaccacatcctcctgcacactgtctaggaaggaatgtggcatccttggagtacatgctggtgctcagggataaggttctctggccagattccctaggtttgaatcctgtctttgctcccaggccaactatgtgcccttgagcaagttacttaacttctgagcctatttctgcgcctgtgaagtgaggacagtaagaataataaaacctatcttaagaagatcaaacaaggttactccacataaagctcctaggacctggcatatcataagtgggtgctcaagaaaaggcaatgatggccgggtgtggtgacgcatacctgtaatcccagcactttgggaggctgaggcaggtggatcacttgaggccaggagtttgagaccagcctggccaacatggtgaaacaccgtctctactaaaaatacaaaaattagtcaggtgttgtggggcgtgcctgtaatcccagctactcagaaggctgaggcatgagaataacttgaacctgggaggtggagcttgcagtgagccaagattgtgccactgcactccagcctgggtgacagagtgagactctgtctcaaaaaaaaaaaaaaaaaaaaaagaaaaagaaaaaagaaatggcagtgatggcagtgatgatgagaatgatcgtagcagccttctccaggaggtgaggctggaagaacggtcctgcctgctgggaggatcatcttagatgtggttatgtcagaagcaggtcctaaagaactgggtggggtttggacatgccatgaaggggtgggaaggaacgaagggaccaagcaaaggtccagtagccagaaagctggagctcgcccaggaaacagccagtgtggggccagagcactggagagcaggggaagaaaaggggaagcaggtcgggcagggtgttgggggccaggtctaagaagccactagacttggtcctataggcattgggggccgctgatgctgtgtggtgcagaaaaactcctttggggaccattgtgtcaaatgaaagagcaaagagtagcagagacctgtgaggagcctcctcaatagtccaaacaagagaagagaattctccaaaccagggtagtcagctggggatggagaggaggcagtgggtggcagagacgccacggctgagattgctagatgtgagtgttcccagctgtgaaatgggggccagctggttttgactggggccaaggaggccaaagccatgtccttcctagagggctggctcaggatacctggttaagggcttataccactcagatccatgcctcccagtcagaggtgccaatcctggccccgccatgggccagcaagtgacttgcaggggaccccttctctcagtttccccatctgtgccatgagtgggttgaagggctgagccctgaggggtctttcctggagggtcctctgatctccacctcctccgccgtctcactcctgaatctctgaacgagtatcaggcctgtgtttctggacagttcccagggtgacgcggggcaaaggattatcggtggctctggggaggcctctgggtgtagctctgagttgatttcatggtctttcagtcccgcttcatccctgggtgcctccaagggcaccagccaagtacaactgattccatctccaccctgacacttgaaacaagggatgttaatacagggagatgctttgggaaccagagcctcaaacatctggagtttcgcactgatgcaggaaatgatgtcccttcctcacgtcagtcattcatggtgcagaggcagggagcagtgccgggagagcaggtgcagccgccttggcgacgccatcctcggggctgataactcagccactgatagctgccccaggagggggtcagcctcaagctacggcagcattcctgccagccgttcctgcttatttcccatgatcttcactagtccctctgactccgaacagcatctccctttctgttcagtgctgactctgtcctccaggcgctggccctgcagtccagcttctctctccttcaaggtccaggcctgtatgacctctctagggctccctctcgaattgatcgctctctctctctcttttttttttttttaatttgagactgcttctcactctgttgcccaggttggagtgcagtggctcagtgatctcggctcactgcaacctccgcctcctgggttcaagcgattctcgtgcctcagcctcctgagtagctgggactacaggcgcatgccaccatgcccagctaacttttgtatttttagtagagatggggtttcaccatgttggccaggctggactcgaactcctgacctcaagtgatccacacacctcggcctgccgaagtgctaggattacaggcgtgagccaccgcacctggctgaattgatcccctttttcccctcagttgttgttgcagaggccgtactcctctggtctgagattatagtcagttggtaattattccaggtgtgcccacctggcctcccaagtctttggggaccagaaggctggcaggccgttggggtgaaggagcatagggaagcaatggcaccaccttgtggacggcctgcttcatgggccttggctgaatgcgtggaggcagaactggggttgggctgtcgcctgcccttgtgcttgggtccctacctctgtaatgccactgagggtgggtgtctgagcatcagcctcgggtgtggtgggtgatccacacgtgcttcccggattcagtgctgagtgtggtgcccactggggtggcttcatgcccaggcctggcccctgccttcctcctcagcacccctcctccccagcctgcctcagtgtctgaaatactccagatcattcctgcttcaggttaagcacagatggcgcctgtgaagcggcagttgacctgggaggggtgcggcaatgagcatttgctgtaccaaggggtgctgggggcaagggattagccagcaagtcaccccattcactctaaacccattgctgtacaaatgcagcttcaggacaggcccctagttcttctctccaaccacactgccaccccaacagtctcatcattgaaaattccaaggcctcccgtgcattgaatcgttagtggtcagcaatacatcatccacaccatgcctgaatatcccagaggtttctgctctgatggaacagaagatgagagaggcgacctacgcggcatgatacggtttagggtcacagcagcagaggatgcatgagatgaggacaaaaaggaggggagaggcttagagaggagtgaaggtgcgaagtcaccctaggcgtacttcatccgtttcggtggggggtctgccctacttatgttccaagtgatgggaagagcttttctccgtgccctgtggtgcccagaaaaacatcccaggcaagtttcatctcttgctacctgaagaggtacattctggtcatcacagatatcaggaactgcccggatccccagaaccagtggcatagagcagagagcgagtctgggccatagggaagaggtggtaagaaggagtgagtcatcgggggtcccgaggggagttccaaaccagcacgagctctgtccgatctgcccgctggaatagcaggcagccttggctcccctggcccagtgcggccccaggttcctccagtgcaggattcaaggtcaatttcccatcccaagagagaggcagggcaggttcttttacctccaggtgaagggggcttttatacagaagaaccagctcacagagcaggcagagtgcccccagcttcaaggttacctctgtccctccccagcttcaggggggaccagaaggggagagtccttcaccaaagaagtgggtggggagctcagcgctggggagtgattgccagaggggttctcacagcccgcagttcctcatggcaggcaaggcctttctcatccagccagaggggagagatgtctcctgccagcaccccaggctacacagctgtgtccccagggcgtatcttggtgtcttcagctgtcccagagagatgattacagagccctgctcagggatagctgggtgtcaccctgactgtcatcagagtggactctggcagggccaggctgaggctgaccactgtgtagcttcagctgtgcaaggccacaaggggcaggcattcatggcggggacttcaagcagagaaactcccctgctccttccagttaacttgatcctttcaaaggaaccttggtgcccaaattcactgttgtgttaaagtcgaggtctgcagctagagctgtttaaggagaccacctggtgacctgagggggtcccggacccctggggcaattttaccaacgagcaccaccaagaccccttccaacctggctgccttcacctctgcaggtatctacaggccttgaggccctcacgcttggatttctgtatggttagacattcaaggggcatctttgatgggggaagcgtggcacccctgaccatcagctccatcccagagggacatccctgcaggaagagctagagtgctgcccagccatagctctcctgacactcctgagtcctcagtggagtgagggtaacatttctctccagaacccacccggcctgtagggttcccccctctcccttctccagcccaccgcccaccagccaggcatctgaaactgcatggaattctcctgccttgaaagacccagtggatggatcccggtgctgagctgaggttactcagaaccccagagccctctgagcttctgggtgccttgtttcttacacggtgtatccgatctgacacgcagccagcggagggccttcttaaagagtctctctttgtaagtgacttccagggaaggaccagacatcctctggttccattgatgcaaataataaatgtccgactacaactactcgcttcttacccttctggcaggtttgggctttagtttcagacgcaatggccagcagcttcttattcccatcttactggcaaaggtgtcactccctggaggcacttgaaagggggttgggttggaattgtttaatctcttcaagtcgagccagtggttataaagccagacattattacccactcattaactcccttgttagggctttgcccttgggcagagctcccctgccagccaatccaaagtatgagagtggtgtgacttcatgtacacagttgggtcacctctagaccctggacaatccccttctcccatctgctgagaagggagttcagttggctgtccctgcctgcaggtaggagggtcaaattctgctttgccccttattccgtcttctataaagcctttcccagatgaccccagctcacaatgacccctcccttctctgagccgtggggctcattgtctcgagctgcatcacttgcctctgctatgggaccaaacagcaccctggtcctcatgctgagctctgcagagtaccgggggctagggtcagaccttatgggtcctgaggggataaggtgagagtggggcacaggtggcccagacagcccactccctccagccagatctcactcattagacacccaacctaggttcaaatcccctctcaggcacttactggctgagtgaccctgagaaaattgcttaacctttctggacctcggtttcctcatctgcaaaatggacactataataatagccacctcaggatatgattcagtgaattaatgaagcaatgtgtttagcccaggacctaactagagttagccttcagtatatgtaagctattgttaccaattaagttatttttataggttttaaatattgggtctgtggataaatttcatttggaggagaaaagtttgctactaaaacaaacaaacaaacaaaaaaaaaaaacaagaagaaagaaggtttgaaagccattgaatttcaaccaacccattttgtacatcaccatgtacagtacaaccgagaggcataagaacttttctgttgggatattataccttataatatatcatttctgtcttactggagaaaaagtattttgaggtcaaaaccacactagctccatctcttttttcttttttttctttttctttcttttttttttttcttttttcttttgagacagggtctcaccgtgttgcctaggctgtagtgcagtggtgtgatcatgactcactgcagcctcgacctcttgggttcaaggaatcctcccgcctcagcctcccaagtagccgagactacaggcaagccaccatgtttggctaatttctttttttatttttagtagagataggctgtcactatgtttcccaggctggtctcaaactcttggcctcaagcaatcctcctgccttggcctcccaaagtgctggcattacaggcatgagccactgagtcctgcctggcttcatcttcatcttttaattctacccctgcccagcaccaggctgtgcctgtggtgggtaagggtgggtccttcctaggtggaaacaaaggcagaaccctgcagagtgcacacaggtgggcaactcaggtcccccttctgaccattctgtttctccccatggcccaccctgctggcatctctatctggtccttgctgactcgcaccaggctcaaggtcatatcctggcacaacacattgtatcgtcttgctcacgaacagacaaccagcaccagctccgtgccaggccttgggccctcctggactaagggtgccaagccatcggctctctccttcctgaagcagatttgcccagggcctcgggatttgtgctaatattcagttgctctgaagtagcctggaggtactggttcccaagagactcagctgccagaatttccaagaaagttctccaagtcttagaggcacaagcccccagttgtcgactcccaaatctcaaaggacccttcaggcatctctggagcagctccttcctgtttcagagggtgagacggaggcacaaaatggccaaggtcagaggccgggccagagctcaggctcctggctcttggcctggggctcctcccatgacatcgaggatcttttctgcaaaagttgtgacccgtgctctgtgggttgctcttctgtgtctcctggggcagagtgggaaggcaggtgggagacagcagccactacccaggctgctgttggtaactgggaaatgtgctctgagactgctgtttggtgggaatggcttggcctgcacttgggtaagtggtgtttactgtcacagcagctcgcatccacactgcaggctgccccccaagaagctgaagcctctcaggcctggctcagctgggagaccctgagggcaggggtgagcctgcagagagggctggacctagaaaagaaataaagaaggaaggaagggatttggacattcagaaccgtggggaacagaaaacaagccactgattccattcaccaaggacaggccagctgctgcctcgggcgtcccctccacccccagggattgacacccccgcccagaaaccatccagtggactcttagcaaatcagccccatagggaagaggaggcaaggctttcagatttcagcatccttttgggagagagctgtgtccacaccccatctttctgagtccactcccagcaattttctcaattatctctttaatttattaaaaacccatctcaaagcccagctggtgagtcagcccctgggaacagctggcagagggtgaatggtgggaggaggggagggggtgggtaaggcctgccctgggtggagctgccttccagatgcggccgccactcctgggtaggacacagcaactctctgaaatgtcctttcaaatttaaaatactcaggccagcagcttaacctagaaagataaagaaacaacggtggtgacatttattacgtgcttgctactactgccagatctgggccaaatgccttacctgaagcttttattgatttgctccaagagaaactcctattcctgattgtcttcctgacaagagtgaggctgagcagttaagaccaaggccacagctgcgagtcacagatctgggattcaaacccaagcctgcagctccggggctatagctcccctcccctcctcaccaccctcctccctcctgagccttcctgtccaccttggcctgatccaaaccctttcacacatgaacctcgaggctgggcaggtgttcatcttctcttttgccctcggaggaaagaagcccagcatggccaaggggcgtcaccaagcctgctgggggctcagtgatgagctgggtcacgctgcacagccccttatggttgggagcatttgcacaccttgtcagctctgactacatgcccaggccatggggactgtcattatcaatgttttgcagatgaggaatgaggctcagagaagccaagtgacctccatgaggtcacacagcctgtaagtgacacagtcagaagtctcatcctgaacctaggctcattcaccaccttccagctcagccacctccccaaaccaccagtgtccaggtagccctgagccaggtgcagcctggagggggcagcaggtcacacactggggcacagacgggctgccagatgtaccagcacctggagcgtggctggttcttggcccaacacctgtgggcaaacccggccgcactgctgctggctcctcactgaccacctcccttcccttccttcttccagtcccctgttttcatagcccaagttggccaagacctggtctcccagacggaggagaagctcctacagaagccgtgcaaagaactcttttctgcctgtgcacagtaagtgccgtagtcacctggcctgtcctccccgggctgcccagagatgggatgccgcagctctccacctgaccatacagggcactgaggcaggtcttccatgcctgacagcttcagccaagttataccaactgtttgtatacttcccacgaagagaaaaagatatcaaggtgccaagtccaaagaaaacatctgctgcaaagggtattgaaagcaagtggctctccaggctgttgagacagaggaatgtgcaaacatttgaccctgtctgggtggtttggaagtctttcccagggtcctcaacccccaccactgccaccaacccgagccagtgctactgatgcagggggagcttctcagccaaaccccatcaccttgtctgcaggtggcacgtctgccgtgcaggaggtgacacaagtcgatggccatgctgccagcagagcaccaactaaacccccaccccatcctgcacacacacactctgaaggcatgagcactgaggagcacacacaagtcacttgctgacacacgcaagcacacacacacacacatacacacacacaggctcatgaaagttctccaaagccaggttaccccacatagttggatgatcttaggggctttttgtgtgcccttattcagcaccacagacatcaattgagtacctactgtgtacctggcactgtgctgggtgctgggggataccaaggtgaacaagaacccaatcctggctttcatggagtttttacaagaaaaacagcaacctgcatgcactttgaggggagctgggagggccgtcctgggaccaagcagtgggttaggtgctggagagaggccctggtgggcagagcaagcttggttgctgctctcttggagctgcccaggaatcagatccaacagtgggtggggtcttggttggtgactctgaccctgagggaatggccatcttggctcccaacgatggctttcaggtttggcaggacacagactctgacgtgccccacctgccatagtcccctcccttccccaggctccaagtgcctgtgctagattactcagtgtggccactttctaaaggaaagaagctgcctgcagacagtttcagaacctgccctgatggcctaagacccatagagatccacagcatcccagggctcggcctggcacctggcccacagcaggtgaccagtgaattccaatgcatgcataaaaaaactcccagtggctttgctagtccaagaccagatccagagctgcggttctgaggggctgtggccccacccttcccccaaccacccaccacccctgattcccagcccctcattaagtcttcgtctgttctcagcttaaggtcactttttagagagacccctctacccttccagtccccccaaactcattcatgatgacatacctctgggatcatttatttcatgtttgctattcactgtttgtgtcccacatacaatgccaaccccttgctcccagctatatcccagggcctagaacagtgcccaacacttggcaggtacccaacaagtgttggcaggaccaaccaatttcatacaaccctcagtagaatggcaggacctctggccagacgtgctgcatctgcatgggttgagaggccctgtttacttgcatttccaaagctggacacagctttgcccccctgcttgaagatcgggattataaaatgttcatcctcttgttccatctgcactaggtctgtccacgagtacctgaggggagaaccattccacgaatatctggacagcatgttttttgaccgctttctccagtggaagtggttggaaaggtgagtccaccacaccccatacagatcagggaggcagagggtacacatttttcatctgagaattcatataaaaatcagttacctcccgtgggctcatggttaaaacaaaattaacccgactccccctgttaattaagttgtgtattctagaaatgctgtatgcttattcaagcacacacacatacacacacacacacacacacacacacacaaacacacattcacgcaaatgtaaacagcatctcgttcttactttttttacttcactgtctttgtcagcaaataaagagctgccatattccttggaatagttgcacatccttgatttaatccagtgccctgttgatggatattgagttggttctccatttttctgtgtggagccctccctaaataataaatagctttgtacataaatctttaagtacttctgcaagtacatccagagaaattcctagcagaggaatttctgggtcagaaggcacctgattttaaaccgtgagtgctgttaagctgctgtccaaaacagctgcccctgacctccagtgccacagtgcccgagtgcctgctcctcagcttcatcaatgctgttctcgtcttttcctatcccgtgagtgagcagggcgcttccttgttgcttattttcttgtctctctaataatgggggagaccaagtgtcttttcttgtgtgcttgctgtctaattctcttcaaagtactcgcccatgcgtggctgtgacttgggcagatgtgtccctctgtgacagatgaggaagcagaacataggacctgacttagcttcccagcaagccagcagtgctgccgacgaggccccggccctgagcccccagcgcagtgctctgctaccttcactggcccaggatttgcagagcggggcgatgcctgtgtaaaatccatgccgggccgagctggtagatgagggtgggagcctcccctcccacagcccagagtccctgtccccagaggcctggcatgcacagccatctgggggcatccagtgagaaaggagccatccactgctgcctgccagccccacagctggctgtgtcccccgtagacactcaggaagctgcaggccaggagcccttctgaaccccactcacagcccttccctgcctgcttccagaaatccagcagaaaacccttggctctgcggccatggatgggtggtttctctccacctgactggtggggatgacagcgtgaccagagatagtctccttagtggccgctgtccaccctgcacaggcacatcatgactccaggaaagcttgagaggcaaaggattggcctagacatctactgagggcaccagagcccccagcctgggtccgagtcccgcctctgcctcttcccaaggagggtcctcagaaagggtcactcacgactctacacctcagtgtcctcatttgtaaaatgtggatgattgtgcctgcattgtgggcttgggctgaggaggagataagataagcacaacacctgctggaacaaggcaggtgttccgcaaagctcagccatttggccacaggaagtaaactgctgaatgcagttgttgcatccatcaccaccatcatcaccatcaccaccatcatcagcatcactgcatcaatatcccaccgccatcatcagcatcaccgccatcatcagtatcaccatcatcatcagtataccgccatcaacagcatcaccaccttcatcaacatcaccaccatcatcagcatcatcaccatcatcagcatcaccaccatcatcagtatcattgccatcaacagcatcactgccatcaacagcatcaccaccatcatcagcatcactgctgttatcaatatcccaccaccatcaacagcatcactgccataaacagcatcaccgccatcaacatcaccaccatcaacagcatcacagccatcagcagcatcacagccatcagcagcatcaccaccatcatcaatatcactgccatcatcaccatcatcagcatcaccgccatcatcagcatcactgctatcatcagtatcactgccatcatcagcatcactgctgttatcaatatcccaccgccatcatcagcatcaccgccatcatcagtatcaccgccatcaacagcatcactgccttcatcaacatcaccaccatcatcagcatcatcaccatcatcagcatcaaccaccatcttcagcatcatcgccatcaacagcatcactgccatcaacagcatcactgccttcatcaacatcaccaccatcatcagcatcatcaccatcatcagcatcaccaccatcatcagcatcactgccatcaacagcgtcaccaccatcagcagcatcactgccatcatcagcatcaccgccatcatcagcatcaccaccatcatcagcatcaccgccatcatcagcatcacagccatcagcagcatcaccgccatcatcagtatcaccaccatcctcagtatcaccgccatcatcagcatcaccaccatcatcagcatcatcaccatcatcagcatcactgccatcatcagcatcactgctatcatcagtatcacctccatcatcagcatcactgctgttatcaatatcccagtgccatcaacagcatcaccaccatcattagtatcaccaccatcgtcaacatcactgccatcatcagtattaccaccatcagcggcatcaccaccatcatcagcatcaccaccatcaacagcatcaccaccatcatcagcatcactgccatcatcagcatcactgctgttatcaatatcccactgccatcaacagcattactgctatcatcagtatcatcgccaccgtcagcatcactgccatcatcagcctcactgccatcatcagcctcactgccatcatcagcatcaccgccatcaacagcatcactgccattagtcccacttcaccaggtctgatactgggaggcacagccaactcttgctggaggatcagtcctgattctgccaattacagggcagtctagtggagctgtgttcgccatgcccacgcccggttctggagccctgggctgtgcaacacacaaccccaatctgtgtccaccttcccagagtggcagtgtggggtcaggatacagagcatgggctgcctagaccccaactccagcccaccgctaccagctagggcctcgggcaactcatttcacctcttgaagcctcagcgttctcatctgcagaatggggacaataatgatccctgctccctgagcttgtgtgaggattatagaagcccccatgtgtgcttggagcagtaggtattgttactatagagacccccagaggggggcatgccctttattcctaggagttcaaataatgacatctgacacatcaccagtttacaaagagccctccactggatgtaaggccttctcatgatcattttcctcagaggagttggagcagccttgggccactcagcaagggcctggcaaggctggaacctgaacccagaggccccctcccaagtccttgggccttggtccacccagcactccagttcccatagcagcctttgtcggtggtcactggctttcctttttcttatctgcaccaaacacatgaaatggagaaattatcctttttactctgtggcctgattgcaaagaaggcattaagtttttggagcctgtagggcaggaccctggcctaggaatgccctacatatcagatagcaccctgcacaagatcctgcctggttggtgctgtactgctgaaatagtcaagggtttttttcctcccaaggttaaccaagaaattcctgggagcttgcattccactcatttcccccagcagaggagttctgcggagatgtcaaccaaccgtttctcctccatgcatcgtaaactgttaggcgggccgccttcatgtggtttccgggggcggctgtagggaaggcttcccagggccacgtggtcgaggcaggcgtgtggcagctcttccctttggctgtccagccgctcctgtgcagaagagcgggatacccgcagaggggcagctctgcttcggtggggtttgggccctgtgtcctgaggaagcactggtgaagggagaagtgagccatggcacgcaaattcaagatggggtgccagagagtaccctggcttttcagggccttcctcagagtgcggctgtggtgccacagatgtgatttccagggaagactcattcgttcaagagctgctgggtgactgaaggctccctggtcatcctcagctgacccagttctttggcccagttctgctcgatccaacccctgccctggtcgggacttttgaggaatttaggagcaggagtttagtcttggagagccaagagccaattttcacgttttaagctgattatttgtagccaaacagaccagcaatgcaaaccacaagccctctgcaccgtgatgtcctttatggcaactagataggaccatgtctttgcttagtccaaaaagtgccatcatgcctcatgatcagaagttctgtctgattcaatgtcataaatggctttggctcattaaaacgaggagttggaagacgcgaggtgatcattacttccaatccgatcttggcaggcaggatcttctcatgttcctcatctatgtgggaaatacaataaagggtcctcagtggtggaaaggttgggaaccaatggtaaagatccccaggacacgatttgaagaccagcagcctctgccccctcctgaggccgggtcttctgggccagcagcaggagtgccctcaggaaggaataagccatgcccaggacaggaagcactgtcatcctgctgggcagactgagatgcacaggtgtagggagggctgtgacctccttcgcgtcctttgtgggacgctggtcctctgtggctcctggcccccaccccttcctgcacagaaggcacagcttccttctgagtttcgccgcatgatttgcagagagaggagaaccacatggagagtgtggtcaagcacctctgcactcaggtttttcaagctttctgagcaagcgaggcttgtgcatcccccagcttgcagggggctgggggctgggggccagggggcttgggatttgaacactcagcttcagactaagtcctcgaaggtccagtctccagcgatgattcctggggggtccctggggctgctgtggggctcctggaattataccccaccccagctgctctcaatgtgccactgtttcctgtggattctgagtcttggcaccatgagaccagtgtgggattcttctttcttccaggcaaccggtgaccaaaaacactttcaggcagtatcgagtgctaggaaaagggggcttcggggaggtgagtgaacattcacgtttttaattgaaagttcttacattcaagtcacctttcctgtcccttctaaatcaacctaaagggttggcccacgggtcccccgggggcaccagtggctcaatgtgggccccgggggcagtgagggtgggagagagtcagtggccttggggctatcaggtgtgtctatggtggaaagaggttgtggagctgggcaggtgagacagacgtgctctcctgccagcctcaggcaggatccagcctgcagaggacaaatgggcagccctggtcgtgtgtggggaggagatgtgagggcgtgaggaggctgggcaaccttggccactcagtgcctggatgacgctgtcatgcaagattcgagatttcgttgtacattacccgatcttcccagcatgtgaggcaagccttgttattcccattttagagatgaggaaagctgaggtccagaatggttaggtgacccagccaagggcgcgcagacaatgtgaggcagagctaagacttaagcccaaatgctttggttcccgcttatctggattatgaagtcagtgttcttgaggatctcctatcactgcctcccaaaacaaacttctctaccggcagccggtaggagaaaatcctgttgccctgggaatggaacggtacttggggccccagtcagttatctaagccttggtgtgagtggctcattctgccccttccagggctgggaatccttgaaggagaggaggagggagggcaagggcccaggacagctgtgggccccaggccaggcatcactgggtcctgggagcctggagcactcatgaagccaggcagggccggctctgaccccatccattctctacctgggaggcctgtggtccccgccctggaggagctcggggcaggcctccacggtgctcctgccaccctggtttctttcttgcactgcaggtctgtgcctgccaggttcgggccacgggtaaaatgtatgcctgcaagcgcttggagaagaagaggatcaaaaagaggaaaggggagtccatggccctcaatgagaagcagatcctcgagaaggtcaacagtcagtttgtggtgagtgagcatctgggcccagtgaccggctcgcccttctgtggactggggcttccctccctccggaagggcgtggtcctctaatgcggccggtccccacccctgggaaggggaatgccagtggcagcgctgagctacagaaaggccgcaagacattcctccatcacacggcccattgtggtcgactgtggctggctttgtcccatccccagagccggccagtgcctggctccctgctgtgcatgagaccgacgcctctgttctcctggaccactttgtaaactcctcagtggacaaagaaagttcacctgggcccaggctgggagctgtgggttccacagaccctctaggctggtgccatcgtggtggggaccttagtgccagcatcctggaatggcactatcaagtctgtgtgcattgtgttagtcagtctaggctgggccctgctgcagtaacacatttgccccaaaccctaagtagctaaatacagcagaggttcatctgtcactcacctgaagtccaatcagattgggccaccctcctccatctaacagctgccccatctggagccttgaaagtgagtgctaggggttccacacagagactttccactgcctctactggacagatgttcctcagtttcacccacagtctgccagccagaaccagtcaacacagagacaagttagtttcaggggaggctgggaaatgtgaagtgcatggatatttggtcagctctaatatcttctgctacacactgttataaaaaataaagctgggtgcagtggtacatgcttgtagtcccagctactcagaaggctgaggcaggaggattgcttgaacccaggatttcgaggctgcagtgaactatgatcgtgccactgcaccccagcctgggtgacacagcaagacctcatctctaaaactaaatacatgcatacattaaaaataatatatacacaaggtaaaaatttaaacagcacagaaggatacacaataaaacgaaaagcttccctctttgagtaatcactccaggcatgttttattcatgcacaggctttattattcttagccaatgggatcttcctgtacctcttatggaggaatgtttttcccttacattgtagatctttttctccatccagacctctagtcacacccctttttaaagttgggcatcattctcctgaagagataaagcataatccatatagtcagtccccatggatggaaattgttttccatctttaaaccactacagggccgggcacggtggctcacgcctgtaatctcagcactttgggaggtcgaggcagacagatcacttgagatcaggagttcaagatcaacctggccaacatggcaaaaccccatttctactaaaaatacaaaaattacctgggcatggtggtgggcgcctgtaattccagctacttgggaggctgaggcatgagaatcacttgaacctgggaggcagagattgcagtgagctgagatcatgccactgcactccagcctgggtgacagagtgagactttgttaaaaacaaaacaaaacaaacaaacaaaaccactacagaccagtggcactcccagaggatggaagtttgcatcttgggatctcatcccaggccacccccagctgccagccttgtcgggggtgcaggtgtgggcagtgccatggtatgtggagatgaggcagatgaggctaacttcagccatcatttcagctgcgggccttcttgagtccgaaaccttcctccccactgccagccgcttcagcagggacccctggatgctgcctatggagccttgtctctgaagggacagtgctggcgggttctgctcagggaagaggatcatgtgattcacaaagctgggtggcacgtctttaagggccttcagttacgatggctgcaccttctttaactgtgccccatccacggccccggcagggagttcccacgatgtcacctcctggatccctttctcggtgatcacctgggcagatgtgggagaaaggggacagctgcagccattgcagcagaagcacagtccccatgagcttgctcatccttggctgccattttatctcctttcctcaaaaatagctgatgttgatgcaccagttttacggcacagccagttcccagcctggcccacgatggccgggtttcatgtgtgccacctccctatgtggagaaggattaccttctggtgtaatttgcccctcctgccccaccatggccttgcttcacagagccttgggtgtctggactccaccagcagaggactagaccccctctcttggtggccctttgccaagtggaccagtgtattagtccattttcacactgctgattaagatataactgagactgagcaatttacaaaagaaagaggtttgatggacttatggttccatgtggctggggaggcctcacaatcatggtggaatgtgaaaggcacttcttacatggcggtggcaagagaagaatgagaaccaagtgaaaggggtttccccttataaaaccatcagatctcatgagacttattcactactatgagaacagtataggagaaactgcccacaattcaattatctcccaccgggtccctcccacaacacataggaattatgggagtacaattcaagatgagatttgggtggggacacagcccaaccatatcattctgcccctggcccctcccaaatctcatgacctcacatttcaaaaccaatcatgccttcccaacagtcccccaaaatcttaactcatttcagcattaactcaaaagtccatacatagtccaaagtcccatctgagacaaagcaagtcctttccgcctacgagcccgtaaaatcaaaagcaagttagttacttcctagatacaatgtgggtacaggcattgggtaaatacagctgttccaaatgggtgaaattggccaaaacaaaggggctacaggccccatgcaagtcagaaatccagcagggcagtcaaatcttaaagctctaaaatgatctctttgacctcatgtctcacatccagatcatgccgatgccaagacgtgggttcccacggtcttgggcagctccatccctgtggctttgcagggtaccgtctccctcctggctgctttcatgggctggcattgagtgtctgcaggttttccaggcaaacagtgcaagctgtcagtggatctaccattctggggtctggaggacagtggccctcttctgacagctccaataggcaatgccccagtagggactctgtgtggggtctctgaccccacatttcccttctgcactgccctagcagagggtctccatgagggccccgcccctgcagcaaacttctacctgagcattcaggtgttttcacacatcttctgaaatctaggcggaggttcccaaacctcaattcttgacttctgtgcactcgcaggctcaacaccacatggaagctgccaaggcttggggcttccaccatggctcgagcactgcattggcccctttcagccacggatggagcagctgggactcagggcactgggcaccaagtcccttggctgcacacagcacggggaccctggactcagcccgtgaaaccactttttcctcctaggcccctgggcctgtgatgggaggggctgctgtgaagacctctgacatgccctgtagacattttccccatggtcttggggattaacattcagctccttgttacttatgcaaatttaggcagccagcctgaatttctcctcagaaaatgggattttcttttctattgcattgtcaggctgcaaactttccaaacctttatgctctccttcccttacaaaactgaatgcctttaacagcacctatgtcaccccttgagtgctttgttgcttagaaatttcttctgtgagataccctaaatcatctctctcaagttcaaagtttcaaaaatctctagggcaggggcaaaatgccagcagtttctttgctaaaagataacaagagtcacctttgctccagttcccaacaagttcctcgtttccatctgagaccacctcagcctggactttattatccatatcactttcagcattttgggcaaagccattcaacaagtctctaggaagttccaaactttctcacattttcctatcttctgagcccttcaaactcttccaacctctacctgttaccggttccaaagtcatgtctacctttttgggtatttttttcagcagtgcctcactcttctggtaccaatttactctattagtccgttttcacactgctgataaagacatacctgagactgggcaatttacaaaagaaagaggtttaatggacttacagttccacgtggctggggaggccccacaatcatggcagaaggtgaaaggcacttcttacatggcggtagcaagagaagaatgagaaccaagtgaaatgggcttccccttataaaaccatcaggtctgtgagacatattcactaccacaagagcagtatgggagaaactgcccccatgagtcaattgtctcccactggtccctcccacaacacatgggaattatgggagtacaattcaagatgagatttgggtggggacacagagccaaaccatatcaactaggcacatcctgcatgcaagagaaagcctttaccaggccatgttccacttcccaaagccccactgcccctccagctcacccttacttggccctgtgagaatggctcccatacccaaaagggcaagtgagccctgcttttctgactggccaagaaggcaccctccagtcttccccagctgatgcacacatgtgcttctgtggaggaagcacagacgccattctgttggattcactgggaggtcggggtgctagcctgccctaacccgccttggccttctcaccttgatccactgaaagggaggagcaggtgtgagccccttatcagccaaggaggccgcaggcagggtcaccgcagaggccatctgggtgcaggggagcagggtgaggctcctctgttccctcacaccccagctcccaggatcctgaggagggaagtggaagtgagtggccattgtcacaacctccccatggcactgttcttgtgctcccaggtcaacctggcctatgcctacgagaccaaggatgcactgtgcttggtcctgaccatcatgaatgggggtgacctgaagttccacatctacaacatgggcaaccctggcttcgaggaggagcgggccttgttttatgcggcagagatcctctgcggcttagaagacctccaccgtgagaacaccgtctaccggtgagtggaaggcaccaaggacttccaagtctaagtccgagggggtggggccagcccctccacaccctcgggcaggtggttgccatcgctctgggaatcagccctggtcagcaccaggggaggatgcagagtcagacagactttccactccaggaagctggggcctccggcactgaggaagcgaggtgggccaccctctggccagtgttctccagcctccaaagtttagggaagccaagcaagtgaaatgatgttcctgaaactgactgctccttcaagtcaaggaggacgggccgtgaccactgctccctccagttgcctccatcccagcagccagggaagctgggagggggcctggtggccgctatctgggatcagtcctgggaagacttgggtcgggtcactgcccacaagcagaatcggagtggcccatggtcccactccatgctgtcctcagcttgctctggtcttcaccccctctccccacccacctcaatcccacagggacctggacattgtagggccaggggtccagattccactcacaatgagcagtgcccttcagatttttctcccagtccttctgaaagaattttgaaaaatctctgtgatgctgcattttaagtagacatttgaaatattccatcatattgaaatagtggcaatttttgatatattgaaattgaacagttacattacactcctcaggggatccagtggaatctctagttgctgtagccaattgatttccacctgcatttatccaaaaaatgcacagaaagctctttagtgatgaggaattttctatcatttccttcactctctccatccccccagaatgttaataatatatttttttgcctgaaagtctttcactgattagcgtacatctctgaaacaaatatatagatacatacaagagtttttgaagttctccttgaccgtaagtctctaagtgttaaaataacttctctggccggttgtggtggttcacacctgtaatcccagcactttgggaggctggggcaggcggatcacctgaggtcagtggtttgagatcagcctggccaacgtggtgaaaccctgtctctactaaaaatacaaaaagtagccggatgcggtggcacgcgcctgtagtcccagatacttgggaggctgaggctaaagaatcgctttaacctggaggttgcagtgagtcaagatcaccactgcactccagcctgggcaacagagtgagactccgtctcaaaataaaataaaataacttcttctgtcgagttgccattgtaattagtagtagatctcatttctaatcagtcctttggaagcaggggttttgacatctggagtgggtcgctacagtcatactcgggaggggaggaggctgcttttcttctgtaacttgggagaagagttattgagaaagggcagatgggagggagatcccaaaagatgccaggacagagcatcctgatgtgaagaaatccaaacccttcaaactgcggacaggagggaaccccctgctcggtcctggcagaccccgacacgcagcccagtttgaagacctttgcagtggagctcatcttgggaccaagaaggttttgaaaacaagaaagaatggtcttgatgacatgcccttccccccataccatccccccatttatgtttctgttttgttttcattcaaatgaaaagagtcaaaattttccctaagggttgaacaaagaattctctacgtgattgccttttatttaaaaagaaaaaagaaagccctccaagttccagctcgtcttcttccgggggaaagagaaccacagtgcctcctccctggctgtgaccactcaccacggcctctctttgggctccgttctggccagtgcccactagtgagctgccatgctagcctggtggcagccggcttgttgagatgatggctgctgcccttatttggaattgttaacacatcaaaagaatgccatttaaataacagcaacaaaagtattttatgataaataaggatacacaaacaccaattatcatttgatgaggctcactggctggatttgggtacattaaccactccgcatgaggacagctgccatcagttaaataaacaaagctgggtggttgagaactggagcctccatccagatcctgtgtactgtttgccccatggcttaactgagttgcacacactctcctcttggctgttcttttacccatagagaagaccttttcctataaaagcagctcctctgctggctctcccctcatcctgggaatgcagaggctcccttacttgtgagcaagatcctgtcatcaagagaggagacattagggacaggataaggcagccacacctatgccatgccccgtagctgttctttctcccaggctgtagcgtagctggtgttgggggatatgccagtctcctgcaggccccatcccaaagggggtctttttcctgtgtccccaccttctcccctttgatcctctcttcccaattgcacagctcccttcattccaggccctgttctgccttcagggcttcctgagacctgcagggtcttctcagccttggagtatcctcagacctgcagtcattgatgtgtgaacaggggccatgactggccttttcctaactttcccagtcaccctccaggattgggaaatgcctgtggcaaacggcagtgttgctttaaattactggaaggagaaaaattagctgaagatcattttgactcaaaccagacagcctgagccaggaggtgggaaggaaacacactgtggccactcaggcctgattagcccgaggggtcgacccagatgccagtgtatcctacctgcccagaatgcccacactctgatgcttgttgtttttcctttcagagatctgaaacctgaaaacatcctgttagatgattatggtaagtcttttcctactcggtagctgaggtgagcattgcaaccccaagaaagcaaagggcctcccagggattctcagagagggctggggaagctgaccacgggccccactcccactgctcagtgctgggtacctggggaagggggaaagctgtgagtgtgaacagagctccgcttggtgaacaggcagtgttcagagagactttgaaattcagagtttttgaaattccctttgaccataaggctctaagtgttaaaataacttctggccgggcgtggtctctacagtgcactgaacaaggagtccagaatttcagagatgctgggcaaatacttaacttccatcaagttctccacctctcatcttgtttgtaaaatggaaacaaagcgtcctgccctgccctgcccacccagaaggaagagggtggtggagaggcttctacatgacagcttgagagggaattgcttgtcagtctagccagctgtaaatgtctcaggcattacgtttgtgcattaccatcattattttctcttggctgtggacactgaataataagaacaaccacagtacccctcacagctgtttagcctcacacctggaaaatagttcctataccttctttttttttttttgagacagagtctcacttgctcaggctagagtgcaatggcgtgatctcggcctactgcaacctctgcctcccaggttcaagtgattctcctgcctcagcctcccaagtagctgggattacaggtgcacgccaccacacctggctagtttttgtatttttttttttttttgagatgtagttttactcttgttgcccaggctggagtgcagtggtgcaatctcaactcagtgcaacctctacctcccaagttcaagtgattctgctgcctcagcctcccaagtagctgagattacaggcacgtgccaccacgcccggctaatttttgtatctttggtagaaatggggttttgccatgttgaccaggctggtctcagactcctgacctcaagtgatctgccctccttggcctccctatgtgctgggattacaggcatgagccaccggtttccacacctttgatctgactagatcttcccacctgcacagagaagggcaaggcagcatctctgtgcccatttaacagatgacaaaactgagcctcaggggagccatcctgccaaagtcacccagcagcatcagtggggagctgagggcagaaactgggtctcctcccaccaggccccagaacctggcagcccccagtagagggaggggagaaaccgggtcgctgatgacctgaagagaggtctgcatgggatactgccctgtggaggggcggtcggagggcccaggcctgccgcccctctctggatgtgcccggtgcctcccttggtctaagaaccaagcccacgctgctcctctgctatcctgactgtcagcccccaccgagccagggagtccacacggctccagcctggcggggtctcgacactggcccttgctgacatctaggctggagggatgggggtggggccctggtgtccataggcagggaagggaaggggacgtgttccttcctgtggggtaagttgtggccgcgaccctgcccaggtgggctgtgggagggacaaagaccaaagtggagcctcagctcagcgtctcccgctctgggggctcagtcctgggctgtgagctgggattcatctccaggctctgccaggtcagaccagatgttttcccttctcgtttctctaaagtgaaaaacaaccaatctccagagaccaacaaggcaggccggggagctgcttcccaaatcgttttataattttttccccttaagcaaattgttgcataatgccagaagaacctcacatttttcccatgaagtaatcccagaaccaagccaagattctctgacctcagcgttccaggaagcccattcagcctttgactaggcaggtcggtcaacgtccagccgggtccaggcatcctattgcatctttatgttccactcctgaagagtgggcattttcctgtgtcctcccacacctgcactctcccaaggctcttgtggtcactctgagatggcagattggggtccctgttgtccttggacagatgagaatgccgagagctcgtatgccttgcccaagggcacacagcaaggccgggtgcccatgcggctgtcccagggacccactgaccctgctgtccccctcaggccacattaggatctcagacctgggcttggctgtgaagatccccgagggagacctgatccgcggccgggtgggcactgttggctacatgggtgagtgctgggctgcctgtgtcaatgcaccttgagacccaccacctgctcaccgccggccgagcccccagagcctgcccgcagagcctctcgcctcttcatgcactgctgatcacacacagagtcacagtctctgcagggctgctggggggcggccttagccagggggagggggagcacaggggccccagatgtgatgactgctctgagctctctgcactcccaggcccccagccccacctgtgtccaaagccaagccactcttaggggtcggggcctggcatacagcgctgctaggggaggccacattgaagcaggggtctgggaggagaggcctttgagaggaaggaggtaattcacaagagcccgcaaatgagaggcgcgcacagctgctgtgtcaccaagcatgattccagtagagagcagccttgggctcctgccacctttcctcagtctgctctgagaccagcgtcctgggggttgcagggaagagacccagagttaagtcctgtgccctagaatcccccgtccaattgggggcacgccctgggcttcctcctgtgcatttcacacacctaccctccttcccctgagaggcgcgtgcccggggagcaggcacgctgccgccctctagtcaggctggtactgacagcagctgcacaggaggtgtgccttgtctctggtgctagagggtccttttcagattgcatgacatttggcaacctgtggagtgtgtgtctgtgtgtatgtgagtgtgtgtgtgcccacatgaatgctgatcgatgattgataggtaggcgggtgggcgggtggatggatggttggatggatgatggatgatggatgggtggatgatagatctgcctacctgtgtgtgcatttgcctgggtctccttttgcagagtgttccatgcatctgtctgccccggctcttgtgtgcaaaccagcacatgtgtggatgcatttccctccagacatacgtgctgatgctgcagaactatcttttctgtatttctatggtaaatctgtaattcggtttatcaaagtggtacagaagacatagcaagagattgtttgaattacagataaatttaagatcatctttaatttgggtagatacacctttattcattgaaacaaatatactgatagcacctgttctgtgccaggtgtcatattgttacggtagtgaataaagtagctcatgttctaggcgaggggacatcaagagtgcaggacacctccatccacggtggtcagagttctaaagctacagtcaaagtccttcgggggcacagaggagagtcatcagggcaagctccctggagggggtggtattcacagcagttggtggggtaagagttggtggcggccatgaaactccaggccttctgtgagcagcgccaccagctgtctccctcctcctcactcctctctcctctcctctgcccccagctccagaggtcctgaacaaccagaggtacggcctgagccccgactactggggccttggctgcctcatctatgagatgatcgagggccagtcgccgttccgcggccgcaaggagaaggtgaagcgggaggaggtggaccgccgggtcctggagacggaggaggtgtactcccacaagttctccgaggaggccaagtccatctgcaagatggtgagctcctggtggccagatgccaccctcaagctggtggctcccctccctgggcctggccccagtctgtccccagaacagcaaacaggctgaagggacaggggtctgagcatgggggtgggggttgcagcccaccaagctagagttgagggcactccttgctgtggactggggtggtcagcggagacttccaggagaaagcctgggtggggcagggacacccaggaaccaagggaagaggggtgaggggaacagtgtggaacaccctcacatccagcctgtgggggggtccacacagggcggagaagagatggtctgagctggtgccccagacacaaagcaaccttgggccaagccccggcccctgcccgtgggcctcctgctccctccacctctggatcctaaggtgttggtttaagacgaagggctacagggggtgggggcgacgatttcagtctttgaacatcttataacaaagttttccaccactagatggactgctggtcacgccagcctggctcctgcatgacagggtctagggatagtgaggtcagacccacccaaaagctgggtgggtggggccagatggggggactggaagccagataaggagtgacaggagccattggaagtgggggatatgggagtggagtccgcccgtgcacccctgccactgggccgccccatgccggccctcaggcccttccctgggaaccaggactagtggctggctttgtggggagatggccacttcctgctgctgcctggctctcagcccccaagtccagcccatgcccccttggggccctcctccttatggtccccagcacagctgtgctggcacccccactgcaagcagctgccctctaatgccagcctcatagggacaggaggggccggagcacccagctccacaattgccagcccacagacttcctctcctctccctggagccacagatgtaccccgtatcccatgtacccggagccacagatgggcaaaccgagcctgggaggggggagccacacttcccacccctctacatctgcaggcacttttggggcagattcagcgtgtgcattgacaacccaggcaactcccggagtttaggaagcagcagtcctgggagttgattaaaagtcgcaatgcttctgctcaggaagacctgagatctgcgccgcaagcggccccaggagggtctggctcggctcctcaccccagaggcccctctcctgcagccagacacctctgcttggccccttcctgtcaccaacctcatcctcacatcacagagctgtgggaagaagtcctgtgtgtacagcagacccacactctaaccccacagctgttggcccgccatgcagctggggcctcagagaaagccacatggtcatcgcagccagggctagggtggggggaccggaggagcagtgcagcactggtcgggtaaatggaaatgtgggtgtgagccatacttggctgtctcattgggagatatctgtcaggtgcgacaaaacgagacaagggaaagaagaaggggtcagacagccgtgggcagagcatcaccaaatgtcccaggtcagggccaggcaatcagagaagcaggtcttgagagatctcagcagggatatgggacgtactaagaggatgacgaggcggagagggccccagtcccacccccagaccccagacacccaccttggcccctggctttggagctgggatctcctgctgcagcctggaccagggtgctgctgtccctctgctgccccctggtggacactgagagaaagcctgctgctcccggaggacctgtcccgtgggtacaaaaccactgtcctctggaagcctctggccttgctgcggcttcccttacaaatgatctttggtcttgggagtctagtcttaggcctccttcacgcccttgactgcagcatctccggcatctaggcctaccttgtcccctccagctggtggcagctcaggacactgcagagcctgacttgccaggagacctcgcaggtcctgggttcacagggctatttctaggctctggtggctccagccctgcctgcctaagagggtccctccacaatcagtgaggaagccagtctctggcccccaggtctgtcccccattctaccttagcagccgcagaacccactccccctcctctggagcccagaaattcacacatctcaccactttgtctcctgagcccagtccatgggcccagacctcagcctccatcttccccaaacccctgctcagtcccagcactgggccttagcccccctccagctccctcttgcctttcagccgtcttggtctcacttgtccttccagcccatctgtacccctcctccaggaagcccgctctgcctgccccacccatcccagctcacaccttctcttcctctcacttctcctggtgtccacctgatagcatgattgcaaactctttacctgacgatgtggctgcaaactgttgactggatgccagggtttcaaatggcagcatataggcgggtgttcaacctgcacacggtttttcaaaagaagtaaatggtaggttcattgccaagatttagaaatgaggagatttcatgtaataacctggattttctggcttctcttgaaaagcagaagccccaggccctggctgccgtcccacctggcaggagctgacacatagcccggcccggcccacccagcccacccctcgcctttctcatcctcgtttgtgccaccttcctggccagctgctgcagcccctgcagaaggagacttgcctctgagggactgcttagaacagtgcagcacctgggcccagcccaacccagtgccttgagcctttgttgaacagtgaagcccccagagagagaagcagaggcatgagtgccagaccctgagccgccagcctggtggtccgtgggggcgttaaggggcaacactgagcgactgagtgctctgctttgtcctttcaagggtggaacctggtgctggccctgatgccaccttcgattcctttgtttggggggcagccccctccagaccctgagccccaagaggccagtctggctgctcactctccccggcgtccccagccggtgcagtgcctgccccacaaggaccagcaggaagtgtacatgggatgaatatgagcaaagcgcacagggcattgggaaaagacaaggctgggcccctaccccaagcagtctgctcctctggattttagcctcaaagcagacacttagtagacaccaactgcgtacagctgcagcgctcagtaaggcagaggagaagagagaatcacgaggctggggcactgggagtgcaggtcaggggccggggccctgtggtcgtgtggctggccatggctagtcaaggccccctgcgcaggtctagccctctggcctcattcatagcctcatcccgtctcacctgggtgtctgctcccaaagactcttcctctcctagtaaccttcctgcctcgtggttctgatgaagacactctcctacctcaaccatccctggctccttctacctccagatgaaaatcccgccacctgacctggccttcaggatcctctatcatctctccctgaccagccccctccccttgacccatctctgcaccctcctcccgctttctaagtcaaacgtgttttgggtgttccccagactcaccctgcacgtcctgccactctgctttgctggtgcagttccctctacctgtatacccctccccctacccacaccttgaaagcctatttgtcctgcaagactcaacttaaatacctcttccccgtgcagctccctgacctccagctggcagccagtcatgccccctgcccccggggtgcccgatctgtatcaccttgatgcgtcctctgagcatgattagccccccatgagtctgagcactcctagaggccaagtgcctcggtggtgccttctctgtcaggaaggggcttgcacccaggaggtacaactctgcaaattagctgagtatgtgcacgagacagagctattgatgcagtccttgccttttgttgcttaccctacacagaagaggtgacagtgactcgacacccattaatgagtgcccaccataacccaggaacgaggtctgtaatcctgagagaaacaagattcctgctctcctgtcccatcaggcatctagccaggctgtgagtgtgtgagcacagatgcacgccaagactcagaggcagccctgaagcaagacctttgcagggtggggcagcgtgtcttgggttcctaggcatggtgcagacactgtggaggcaggaggtccggacaggaggagaggcccaggggacgtggcttcatggggctctctgtttcagctgctcacgaaagatgcgaagcagaggctgggctgccaggaggagggggctgcagaggtcaagagacaccccttcttcaggaacatgaacttcaagcgcttagaagccgggatgttggaccctcccttcgttccagacgtgagtagcctcccccagcccccagcagctcccttcacagggtacccagggctgcccccgagtgctgcctcacagtgagctggtgcagagtgtggggcacatcgtgtctttgtggggaccagggtcccctcccggccactcctcacctaagctgcagatgaacttcacgccaggcagtgcagaagaggcgtgggccagggagcccacattggctgtccagagacttgggcactttcccaggtctgggggtcctggacagattccttctaagcgtcagtttcctccctgtccagtgaaaccagtaacactcatgcctcccacctgcctgggagatttgagggtgaaatgagaactgaatggggaatgctttcaagagcattgacggccactacattcagttcatcttgaccagcatgcatgcatcgagcactactgttgacgccaggttctgggccaggcagaaacataagaggcccctcccccagcagctcacattgcagggagttgcatcttcccaggaggtccccaggtcccccagtcggtgtgtgaggcaagattccagctgaggtagaattgtccttgaaagtcccctacatggtctataaatcatgagctctcagctggatcagaggcccaagagatgcagaccaggcagaggctgggtgatctgtgcgggatacgtgctgtgattccggggcctgctctgtttaaagtcagggagtcagaagccaggaaggcctgctgtgcttcggctcctgccacgctcccgcggatgaccccttgctggcagggggactgggccggggactatggaggccgtgggagcagcagtgtgctgcaggcgaatgactgcatctccagagagctcatgtgcacctctcttcccaattccgtgtccaatggctttgcgtcggtagcttacagtagatctggtggtagcatctgcacagcagcaatttgcaaatgctacaaatcagggcctctgcgtccccctctcccagaaccagtggttatcacttaccagtaccgccctgagtggaggcaggtggggaccgtccttggaactctggcaccccctatacatggggattccctggtcctctgggacagaaggtggcttgggaagctgctaggtgcggatcagtgtccatggcaaccacaccacagaccccgtctggccagggatggcatcagtgtgatgggtaatcagggaatgctttttggagaaacacgggggccactgagaatataaagagtaggccgggcacggtggctcatgcctataatcccagcacttgggaaggctgaggcagtcgggttaggagttcgagaccagcctgaccaacgtggtgaaaccccatctctactaaaatacaaaattaaccaggcttgggggcacacacctataatcccagctacctgggaggctgaggcaggagaatcacttgaacccaggaggcagaggttgcagtgagctgagattgtaccactgcactccagcctgggcgacggagcgagactgcatctcaaaaaataaaaagtgaaagtcactgaatgctgcaaactcaatctgcagatgagcttgagcaggcagggggaggatggtaatcacagcattgctctcgaccctggctgcctggcgaaccgcctggggagcatgaacaacactcgccttggatgcagtccccagggagtctggggtaagactcgggcttcaggagttttgaaacctccccagctgattctagcgtagagccagggttgagagtcactattatgggaagtgccacatgcaaggagtgtgttgtttgttgtttgtttttagtgccaagggctttgggagtggccactccttggtgttccaggaaaccacatagtgttgagtgcatgaacatcacggttgtgccattgggctgatgtccgaaattggagaggatgtgggcatccagactgggggtgtggcaaaggtttggaacccgggtggccatccttgtggcctctgggctacctattgctatggtgacgggctgagattagtcatcgcattggagctattcctctaccttccagcacactccaggtcccgtgccaggccccaagggagatcccatggcacacaaaacagttggttgtttccagtctgaagaggagcaggggtgtcagcaaaaccccttaaatagaagtagaaatacgagtcacaagagaagagaacaggcagcctccgggaagatgggagagtagcggggcctccgtgcgtgcacccaggcatggctggagaaaagcgctccaggccctggaagcagcatgtggaaggaggcggctctgagggtcagagcgaccaactgtcctgctttgcctgggactgtcctgcttttagcactgaaagtcctgtgtcctggggagacagggacagttggtcaccctgggagtgaccctggccacttcgaatcagggcattaggaggatgaggtagcagagccccgcaaagcgcacagcctgacaaggtgcacagagcagcccaccggtgccctcctgcctcagccgtgtaccctgtggcccagggcctctgttcctggcatccgaggcctcaggtcagcaaaggttgcaggccctggagtgcgaagccgctgtgagctggggactttgccttttccccactggccctccccaggctgcacgccaacccccagtcatccctgccagccccccacagtcatcccgccccccacagtcttccctgccagccccccacagtcttccctgccagcccccccagtcgtccctgccagccccccacagtcatccctgccagccccccaccatcgtccctgccagccccccaccgtcgtccctgccagccccccacagtcatccatgccagccccccacagtcatcccatccccacaccactgtcggggctgctgccacattcctaaaccacgagcactgtgagtgacatcatctttttcacttccattgactctttttttaaaataaaaatcaatgtattttaaaaggaaacctttccaaggaaataatagccatgaaagaggggtttgggtgtgccaggtaactttctgttccattacagatttttaaaatacgctcatttcttaacattcctctgcaagccacccagggccagcttcgtgagcttgacctggcaccccctagggcaccctgggtccccacacctggctcagtgccctctgttgccatcttaaaattctaaatgtggaacatggaccctgcgttttcattctgcgctgagcatgtgaatgatgtggtcttgcttccagctaaaagtccgctgagttccacggtggcgtgcaccccgggctttgggaactagagaagggtcgcagctctgcaactggacacccctgcccgcacccctgcttccgtccacgtgcacttgggcccatggtttgctttgctggggacagcatggccttgagccttgagctggagaccagagcagactggaggggagagtcccagaaagtgccgagccctgagaccattgctagaaccttcctggcatggcggagcccatgctgagccggtgcactgattcacaaccttcgtattagccaaatgtcaggagactataagcaggaggtagcctctaccctccagtgacagatgtgtcaccaggtctggggatcccttcacaccccacctggggctgtctctataaaggcctcatctccagaggctctgggaagcctccccacaccaaccttgaactcttagagggcagggtccacccaggttcatctctgccctggcatagagcaggcccccagtgcacagctgagggacgagtaaggcaaaagatatgcctaccataataataccagctcccagttacgggcgccaggctcggtggccagcactgacagcagccccatcgcccaggtgcctcgttgtccccattttgccggtaaggaaacaggacataggcctcaggggatatgagacttccccaaagttcctaagccccacagctgggactctagcccacgtctgtccagtatgggtaagggagtgatggcaggaatgagccctgggctgggcacccaggtgccccgagctcctgtgtcaccccagccagggtccccgtcatggatctgagagagggctgcactgtcatctggaggggtcgcacaaaaaaaccacaggccatcatctgaggtggacaggaagcccagccaagccactggggccgacccctcccctggactcacctgcatctgagccacacaccctccagccactacccatagcagttctgggggtgtgtcctgggaagactcccttctgctccccaaaaccccaaggcctggctcggggccactggagccgcaggcgggacatatgtgtgaccggccctctgcccctggcagccccgcgctgtgtactgtaaggacgtgctggacatcgagcagttctccactgtgaagggcgtcaatctggaccacacagacgacgacttctactccaagttctccacgggctctgtgtccatcccatggcaaaacgaggtgagcagggcagaccacttgctttggtctgggtgggagggagggactgacgggtggaaggaggcgtcgggaatatgagtttggcggcaggaggctgagcgcatggtttctgttttctccatgaaggcagcacacaaaagctgtcagtggccaagtagggagctgtagccaccacgggccagtcattgacggggagcctcgcccagcccctgagacctggagggcgtgtggctcaggggcaggtgaggccaggggagggagccccagtggctttgctgctgggcttcctgactgccccagttgacggcctgtgttttgttttcacggcccctccagatgatagaaacagaatgctttaaggagctgaacgtgtttggacctaatggtaccctcccgccagatctgaacagaaaccaccctccggaaccgcccaagaaagggctgctccagagactcttcaagcggcaggtgagacacccatgcctggccagtcctggcatcagctccgagacccctggctcacttccatgggaaacgagaagacccacagtagagacccttggaaggcttggaagtctggggcagtagcagcttggaagggcaactgattatgtccaaggcccctgatacccacggcagctgatgggatccccggggagaagggcagggccagcccaaattcaccctccctctgggtttctccgccttgacactgttggcgcctggggccggttaattccttgtcacagtgccgtcctgtgcatcgcaagatgtggggcagcaagtttggcctccacccaccagatgcagcaacacgccatcccccagtcgtgagagcccataaaggagccagacattgctgaatgtcctcaggggcacagtcacccctgattgagagccactgccctctctggcccttacgaagcctcagtcatataaagactgaacatcataagcccagggagaactgggggtagaagctgaccccacagaaccttccggctcctgggatggcccccatccaatgctgtgccctctagctggcagccagaggagacagggcccttgggaaatgacacttagagcctggccctgggtaagggttggtgtgggccaatggaggaaatgcgggggaagggcccccacctcaccccacaccatgaaggtggccaccatacaccccgtcttggcctggcccctgaggaagctgtggcccagtgtgcccgccctggagcctgggaggctccctcacctagttctgctccttcctcctctccacaaagagccagctccaggatggacacactcagccagtgataatataaaaatacaacgcttcaatgcttccatcaagtaaaacggaagttccagaaagaatgacctctccctcccctgatggccaggcatgctaagaacaccctgggtcctagaaaaagaaattaccatggagtctcacagacccgggttcaaacccagccctgagacttcttggttatgtggcaacttacggaacctctcccacctcagtttgcctgcctgaaacatcaggatagaaatgcccattgcctagagccacgggtggcggcccacatatgggcaccagcacctgtgaagcaaacgcttcttgcctccctcctcctcccctctgcaacatgaagggcccagcactcacgggatgcagagggaaggcctgagcaatgggaacgaccgcccatctctcccaggccggccctcgctagagccctttgcatatgaggccccattgtatcctcccagccaccctgtgcggaagctgctcttctcccgtgttacaggagaggaaactgggagatggaattgcatgcccaaggccactctgcgagggaggggaagactgagaattccagcccaggcagcgtaaccccatgcctgcaggcttaaccaaggtggatattataggaggggccgcctccaccctgattggaggttctgttaattccatagctcttcccaggtacctgtgcctccaggggtggcccttgtacctggctctgaggggagactgcaaaaggcaataaaaagcaagggttggagcaggcagaggcagccccgacccatccccagggctcccaggactgacttctgttctctccaccccgtctcccccaaccccaaccccagcatcagaacaattccaagagttcgcccagctccaagaccagttttaaccaccacataaactcaaaccatgtcagctcgaactccaccggaagcagctagtttcggctctggcctccaagtccacagtggaaccagcccagacccttctccttagaagtggaagtagtggagcccctgctctggtggggctgccaggggagaccccgggagccggggaaggaggccgtccatcccgtcgacgtagaacctcgaggtttctcaaagaaatttccactcaggtctgttttccgaggcggccccggccggggtggattggatttgtctttggtgaacattgcaatagaaatccaattggatacgacaacttgcacgtattttaatagcgtcataactagaactgaattttgtctttatgatttttaaagaaaagttttgtaaatttctctactgtctcagtttacattttgtatatttgtatttaaatgaaagtgagactttgagggtgtatattttctgtgcagccactgttaagccatgtgttccaaggcattttagcggggagggggttatcaaaaaaaaaaaaatgtgactcaagacttccagagcctcaaatgagaaaatgtctttattaaatgtagaaagtgatccatacttcacctttgaaggattggttgtatttacccacatctatctctggagccatttcctcacattggtgtcacccttctgtcggcttggaacaatctgaattaaatgttccagacacacgtgggacttccccctcccagccagaatgtcctctcctggggccctcggagtcgcctaggctgagcccttctcctcgaggggcacgccgagccactgtcgcacccacctctgtctgctcttccttcaggaaggcggctggcacgcggatctaggtgtttgcagcctggtgggcgatgggcctctttccttctaagcaggtcctgactgctaaagccagtcatttgcaagaggtttgcattgggggatttttgctctatttttaacagaagcataggaccgtaaagatgtgtcatgaaaccccaagtgtcccaaagcctcggggcccacaggagcatcgggaagtgaggcagtgcgctcatcctgacggagcagcgtcgtgtctgtagcggggagggaggctggcccaggggcccggcatgttcctgaagcgttcacagggttttgagaccttcacagccccatcaatgtgctggcccatgtggcatggatggggtagtctctctgggcaaatgagaggcccaaggagagaccaagccaccaaagggctcaagacaaagtcactgttccttccccaggaaggtggggcagaggcaagatctatcggacatttcaaagtttcaggcaggagctcctagaggacttggtggctttgccagcccaggggcctctgaaggcagcccccagacccttgtagcagggctgtccatccccagggagcagctggccacctcctcctgcctcgaagaagtgaccaggggccaatctgctcccacctcccgtccaggacagggtgaacatttgacctcactgtcccctgcccggctgagtccctgatgtctgactgtgccacccagcagctgccagggtctctcaccatgtggaccctgccctagctgcagctgcacctcctgtcaaaagtgcagactcgcaggttccaccccaaaccacagaatgggaatgcctgggagcccacccctgctgtgggctctcagcggggctttgggggtgatcatcccaaacacatttctctggatgacgcaggcagcattggagcatgagccgtggggaggacagtcgtgagcacaccagctgtgaggcccggtttccatgcctaacccccggactctacccctgggtcctggggcgtaccgctaaaagggtcctggcctttgggactgatcattttgaggcccttttacaaagaaatgggggagaagaaatagctgggcttccctcaaatctttttaatgtgcagtatttttttgttcaagaccagctcttgttttatgaggctccttccattacctttcttgggctgaatgcaaaacaaatacagccacattcaagtcttccaaggaagtagaaaactctttgaatggtatcttaagatccttaagctcttgctgaacttcctttttcaatgaaaagaaggaccatcatcctaggatggtcaccagcccaagccaccaccccagccacccatccaggaggttggttccttttgcccagttcatagcagctcagtccttaccagatggattcttggtgttgggaagcagcctctttttattcctgaaaggcaatgccctgtccgtttgcagtagagaatccccagggagcaagaaagatgacagaagtgtggctgccgtgtttctaggtcatgagagctctggcgatactaccacaaggcctgcacgtggactctatgataacttgagtcttccatcatgtttgccaccagccctccctgagtgcccagaggagatgggggcagagtcacttggcctactaaagcctcctgttccttctggctcatgcattgctttgtggtaagagaaaggaagtctttagaacagcgcctgggaatcagcccttctccctactgagtccccagtcctgtcccttccctgactcgctcctcctccaaccttggtttctatagctgcatttttttttttttttttttttgagacaagatctcattgtgttccccaggctgaagtgcagtggcatgattctggctcactgcagcctcaaactcctgagtccaagctatcctcctgcctcagcctccgaggtagctgggaccataggcgtgcaccaccatactcagctaatttttaaaattttttgtagagatggggggggggtctccccatgttgcccaggctggcctcgaattcctgagcccaagctatcctcctgcctcagcctcccaaagtgctgaggttataggtgtgagccactgtccctggcctatacggtcattttttaaaagatattttaaaattaaaagcaaacaacactgtccacccatctacctgtccaggataaggcatatttggacggtgaacggatttactctcgttcatgcatttgagcgcttcacagaagagtctttcttgctccaggcatgacattttttttcaccagacgttcactgacttcgtgactttgaggtgagacatgggatctctcagaagcgtctctgcatctgcatttcaggagatgagctgctgtccctggtggacagaggcggtctctgccatggtcaccatgatgccctacaagtgtttattgagtcccctggggggcacccagaataccacccaaaatagcaagaagacccggtccccgccttgcggacgatgcactcacatgccacagcaacccattctcgcctcttccttggccgggaacccggggctctagggctgctcgctgctgctgtggcctgcgcagccacgggaggcttcctgaaaggcattgctcggaggggcgggggcggggaggcctagcctgccccacagacacagctgtgaggcctgggtcatacacataccagcaagcagctgccgagacaaatggtggtgggaagtcctgggaacacacacagcctttgcattgacagcacaagtaggatcagagcccaggtgagcccctgaggataccgaggccttccctccctgaggcccgcaagtctccatgcgtctcccgggagcctggccccgctgcagaaatcccttctcttcctccacaccctgtcctttccccaaaggctcgtgttatcagttccagctacccatcgactttcccaccgagccgctgccctcaaaacggagggggcaccgcagcctccttgagcctggcatcccaggccttgccaaaggggacggtggcttcctggataattggaaatctctgagaagaagaggaaacacctgagtgacactcagctgtcctctggggtcccctggtgtgcatgcacgtcctcctgaatacctgtacttccaagaggtggtctcctgttttcataacccaacactctgagataggatcttccaactttttagccccggctgtggaaagatagtgagtatgaagtctttgtgcatttggaagtgacatcgctgtgtggattatgaatacagagagctgccatcttcctgatcacaatagaccacgattgcaaagcctcctctcccagagaccccttctgcgcctgccctccccacccaccacccagctgttgaagctcagcgtgtgcaagtcagaccctgcacaggccgggggtgtctcacctggcctaaacgtaaaggcttgtgccggagacagtgattgaaaacatttgaaaagccagctctccctggcagagaaagacacttcccccccaaagtggaatttagatgtctttccctagtccatcaagaagtcatttttgtaacagtccctaagcgagtgttctcaattagaagagtttagtggcttttggtgttgttaaaataataagaatccttctagcatccaaagctttctaatttttttcagggagatttggacattaatgaatggaaacttccacagtggcggtcactcctgaaggcagcggcttctgttctcccgctgctgtaactctgtgtgttccgtctatcgcgtcacagtgccgctggatctagatggagccactgttgttgtttttaaaagagaaataaattccttaatggaagta

SEQ ID NO: 234 - DNA, 17905 bp, Homo sapiens
  source 1..17905: mol_type = genomic DNA; note = NC_000010.11:c101843875-101825971 KCNIP2 [organism=Homo sapiens] [GeneID=30819] [chromosome=10]
aaagaggggaggaggcggtgacagccgcggggagggggcgggaggagagaggcagctcggctcggctccgcgctcagctccgctctgcctccggctctgcgctcacctgctgcctagtgttccctctcctgctccaggacctccgggtagacctcagaccccgggcccattcccagactcagcctcagcccggacttccccagccccgacagcacagtaggccgccagggggcgccgtgtgagcgccctatcccggccacccggcgccccctcccacggcccgggcgggagcggggcgccgggggccatgcggggccagggccgcaaggagagtttgtccgattcccgagacctggacggctcctacgaccagctcacgggtgagtcagtgacgtgggggtcgcgggagggagggtggattccattcctccagacccttccgcctctccgaccccggcctggcccgcacccacactctgccccattcccaggcactcttatggccggtctgggcggcaggacactgggggttcaaagccttgggtcccgcaggggttggggaggaacagaagaggcaggtgtggagaggcagcaggtgtgggcgtatgtgacacagggctgagagggtgtctggagtgggaggtgttacgtgcgtgagcacctgtcattctgtgtgtgtgtgtgtgtgtgcgcgcgcacctcccacagctggttgccatgtgccctgggcttggtgacagctagggtgagtgtgattgtatgtggcagtgcaattgtatggtctcgtcagatgtttgagtttgcgtaggaccctggttgtactgatgaagttgttttgaccatgtgtctctatgtgcaacgatgtgttgtgagtgtgtaattctgtatgaagtggtgtgtaactaccagaatgtgtcagggctctactttagggtggcttgtctctttgtaagccttcatgaccataagccctctgggcaagaatttgttaaagtaggttgtgttgtgttttgtggttgtgagattagtgttcagtgctagttgtgtactttcatgtggtgatgtctgcagcggggctctgtgagtgtctatgacgtgtctcatccctgctgcctctctggcttcctggtacagataggggtctttagtacaccccactccttcaccaatttttccacaaatagcccaggtggacccaaggagggactttagtgttcagctgcccagtctggtttccaagagaccttatggctccagcacctggcccctgtagggaggctttagttagtgctgggtcagccctctctccccacaccaaatcatgtactgagattattcttacaactgaatccttcaacccccaacaaacctttcagaacttcactcaaaccccaggaaaacacatcctcttccttcccctccagagacagagctagaagctctaggcctgggaagtgccatgtggtgtcctgcatgtccaccaaaccacttggctgcccgggcatcctctctttcccacatggggaggtatgtgaggccagtacatctgtgcatgtgcatgttcctgggtttggtaggaagagccatgtgtttgtgtaggtgactgtgtcaccctgggtacatttccatgtatgtgtttgtgtctctcattgtgcagcctgctctagaaagccagcagagtgggaggagggaggctgtctccctgaggccaaaacaaagctggggaggtggagggaggccatgatccttgtccttcctgaggggagtgagattgagacctgggaagggggaggggactaggatgaggtgccttgagcatgtgtcttcccccatcccccatcactgtccctagggaggccctagtcaggatcaggggagccactcaggctggccccagatgagagaccatgccagatgtgcctcagagctggatggaatccaaaggacccactgtccagctcttccatgaattctgttcccatcaccagcttaggattcttgagagtagtaagggcctaggggccttcaatagtatcacattagtcagtgtttgcttccagctttaatgggttctcacccttagtgaaaccatcccttccccacttggctatttgaatgagattgggtgggggaagcatttgtatttggagatgccctgccccagttcagtcaggaatggaagtgtaccagctatgtgacttttgttctcttggcctcacctttctcatctgtaaaagggaatgttacttcctgcctgcctgcctacctcccaaggaaaatggaaaggtcaaatgttgacaagtatcaagaattgtggtccgggtctacagcagcctagctgtagatagctccacacacgacttggaaagtagaaataggactaccaggagctctcctctcgaagggcggcttattttatagcgggagacaaatcgggttgggacgccagtgtcaacgaagactcccgggcgggcgggcggcgctgagctctgagcgctgagagatgcctaagctgaagcatgaaggggagtcgttgtccgcggtgctgaagcgcgcgccaggcttcgcctccccttccctgcagttgggattcctgggatcggatttagggtagtctgcagctcccgtcttcccggcccatcaggcttgcagggaagcagctggaaagttacacctcagggcatcctgggtacctccgaacattttacttccccactcccaccccaagctcaaaagggagctgggagagactctttaggaaaacaaaacaaaacaaaaaacagtccgagccccgcccggacccctgtctaatccctcaggtcttcccagcccggcggggccgctgggcagtgcggttccgaggggaaaggccgcgtttagcagcggccctgtctgagcggaagagagaaaggccaagagaagatgcggagagggttggagcctggctggctagccctgagctcggtcccccgactgggatctcagtggagtccctccggccctgagtattgttgccggggcgggggcgcccccgtgtggctgcgaggagccatgcgcacggagctgctttgcggtggggatagtcgccgtcaagtggacaagatttgcccagagttaggaggtcattctcaccacttaaatgtagggttttcaaccaatcatgcgggatcccagtcgaaagagcgggactatatctctcccgtaggctttcccaggaattttaaggcgttagagagtcctggaagtgtttacttggggtctaacctgatagagatgagtccggagtccaggaaaggggcgcagcgggaccgaagtggggggggggtgcggggggggctcttctcgaagcattcggctgtagccagcgtatggtggtagtctgtgaacctgccgcaccgagacaaacacaaatagaaacagttatgagagcaaggaatttggagccaggagacagaaggcagtggggcacaactctgctgcctcttctttgccaccccaatacactggcctctttctccttcctcctggctttcttccattggcccaggaagtgtggggagttgccatgacaactctgtcctcttaccccttcggctctttatgccaaaatggtgggggcggggtgcagggtgcggggaggagtgcgacaggcggagaaaggggggctgaaagggggcaataaaagatacggttcattccccatccagctcttttctcaaaacccacatgtgcctgcctggcctccccgccagaacccagaaaaatgctccctgagaaggctgagtccgcgccgcccctccccgccaccccccccccccgtccaggaactttgggggcggctgcttcacatgatggggccagggtgagctcctctcgtgcggccaggagaacatgggaaggctccagggtttcgatcctatgcctgccgggccggccctcccgcgccgcccacgcgggcctacccgggtgagggcggagaccggaccgccccggggcctgggggtggagcttagacgccgagctcgccgccaaaccatgaaccgatgcccccgcaggtgccggagcccgctggggcaggcagcgcgatccctctaccagctggtgactgggtcgctgtccccaggtatgatgaggaagggaagggaggggcaggatccttcaaaaagtgagcgaagtgggttaggagctccgcagaggtagggagggaagggcccctcaaatagatggagggagcaacatccctccaaggaaagggcttccaagacgagatcctggacagaagcggagcaggggatgggcctccttactgagcaggaggaagacagcgctcttcaaagaggaaaggagaggggcatcaaggtccctcacaatggtggagggggcggggcttctcaccgaaggcagaggagggggccttaactgaggggcagggcgcctcccagggatgaaaggaggaggcctgcagcagagcagggaaaaagttcagtcctttcctgcatttcttggctgaaggggtcttaagatgaagggttcagtgtccagaaggaaaaaaccctgagatgggcctagaccaacatgaactcagctagcaagttcatacatgacatgggactgatagacttgtgtggcttaaggattgtatgtctctgttttctctctctctgggagtgtgtattaatgggattgtgcattactaagttgtgcatcactgggctatgtatggctgagtctgtgtctccctggggttgtgatcactgggattctgtgacactgagactgtgtgtacctggagttctgtactttaggactgggttgagggttcctgagcctctaagttggttgtgtagccttcgtgaggttgtaccttggtgtgaaatttgtggagtgtatgaggtgtggattgttgagtatcccacggcactgctgaggtgtatgcacatctccacttgcatttccttatgactgcttgggcagggcccatagaacgcaacgtctcctctgtacctgacctcaaacagaccaaaacaacctggtcctgtggcattctgagatctgtcattttctggctctctccatgggtatccacttgagcccctggagtatagatagggcctgtggcctctccttgccatctgtcccccaaaaggagggtagatggatggtcctgagccagaaccatacctggaaatcttctggggagcatacaacctccaagccccctgcttgggcctgtctccagtgacagatggctggagccaggcagggccagctctcagtcattgcaggcatgacttccaggacccaaaatagccccaacgtctagggaggtcattaatcactcgatgcagctgggggctgcagtgtctttggcctagctgggaatggtgtgggtctgggggactgagagaagggctttgaggtcttcactggctgggttaacagtggcggtggggggtgggacaaagctaaactggggaaggtgggacagttgcatagagtgggttcccccacaaggcagtgttactcacatttgaactgggggagataaataaataaatgataggaatatctctgtggtaagatttgagggatctggggaaggcccacctcatgcctcgagatggttttcccttgagttcccactctgccaaattgcttccacagagattttactttgagtgaagagctaaattcgtggcacagggatgcttggggaggatggatctggcaagtttctcactgaacccgaggacttgagaagtctctgagtggggagaagggacagcctggaaaaataactcatcctttcactcctgacagactctgccacaggatgcctggctgatttaggaccatgagtcctggcaaggctgggtcaaggtctctgagagttgagagtgggagttaggaaaaggaggggccagggccagggccaggtccagggcaactggctgcaagttatcagtagcagggagcaagaaggggctgttgtggggcccctttccattcaaatagtctggcttggcattcaaggtttcatggaatttgaccctttttgattttattacccatagctcccttacctaaactaagctgtaggccctaggattccttgacaccccgcacatattggagagactgcctgagggagctgacagatcactgactctggttaaacaactcattattattatcattattattattattgagacagagttttgctctttcagtcagactggagtgaagtagcgtgatctcagttcactgcaacctccgcctcccaggttcaagcaattctgccttagcctcctgagtagctgggattacaggcaagcaccatcacgcctggctaatttttgtatttttagtagagacggggtttcaccatgtgagtcaggctggtcttgaactcctgaccttgtgatccacccgcctcggcctcccaaagtgctgggattataggcgtgagccactgcacccagccaaactcattcttaattagcatgtcagctgttatcttggaaaaaaaatcactcttttttcccaagataagcagggagcttatcttggcggggagcttcaattccttcatctgcaaaatgggtatactatcactcactctgaccatgtcagctgtaaaaacaggaataatagatcctacctctcaggtttattatgaggactaagtgagatactacatgtaaagtatccaggacacaaaatgtgctggataaatattatctttgtttatttgtttattttgagatggggtctcactttgtcatctaggctgaagtacagtggcacaatcatggctcattgcagcctcaaactccccaccttagcctcccaggtagctgggactataggtgtgtgccaccacgccaggctaattattattattttttttttgagacagagtctcgctctgttgctcaggctggagtgcagtggcgtgatctcggctcactgcaacctccacctcctgggttcaagcacttctcctgcctcagcctcccaagtagctgggattacaggtgtgtgccaccacgcccggctaatttttgtatttttagtagagacagggtttcaccattttggccaggctggtctcaaactcctgacctcgtgatccacctgcctcgacctcccagagtgctgggattacaggcatgagccaccttgcccagcccaggctaattttttgtagagacagagtttcgccatgttgcccaggctggtctgggactcctgatccaacctttagggattggcaagcaatccctaaatagactttttcctaggggaaaggagtggaacagaccaagcctatttgaggccagacgcggtggcacacgcctggaattccagcactttgggatgccgacgggggcagatcacttcaggccaggagttcgagaccagcctggccagcatgacaaaaccctatttaaaaatataaaaatcagctgggcgtggtggtgcacgcctgtaatcccagctattcggtggctgaggcacgagaatcgctagcgccaccgcactttagcctgggtgatagaacgagactctgtctcaaaaaaaaaaaaaaaaaaaaagagaaaaaaaagcctgtgtgaagcgtcatcttcccacctcttccctggatggggcaggtcggggagaaggaaggtgtatggtactgtgtgaggttggacgcgtgccccccggtggtggctgtatagaactgcagatcagccaacctcgactggggccttagggactggcccccaccccacaaattgggctgagacacagtcatcccagagctggacaagagggagggctccttctggggccaatccccctaaattgggcctcctggctgggccagctttctaagaagggagccagtgtagtgtggtggtttagagtgaaggctgagtcagactgggttaaaattgaagctctgatcttgaagatttgcttaacttctctttgacttagtttcaccacctgtaatatgaggataatagtatgccttcataggcttattgtgaaaattcggtgttacaacacctgtaagcacatagtgcattatctagtacatagtgaatgctcagtcaccgttagccagcagcggtagtaatggtgttactaacccagaggccctagtcttgtggctcattggctctgtaggcctctccccacccctttacacacacaaacaccccaccaagaagaagcagggaagaggagggagggactccggggatgctggctgggaggggtggctcccttagaaggttcagatttccctcctacagcagctgggcttctccatcagctcaataacagttcctaaggagcaggcagggctttagcatctcccggatgaggtcccagccacatacggagccagcacagtcccccctcctctcccaagaagcttgggtttcttgaccccaaaggcagctgcagtaagtcccctccccagagggtcctgatggggttaagtggcctttttctgcctaggctactactgtatcttatcccccctcccttgggcctcagtttcactgcctgtggcctgtgggaagagagtgcttccctcctcacagtctccatggcaaccaaatcgatattggtgatatcctcctagcaggagaggtcactgccttctccgccattattctcatacaattccatgccaatacaatgacaaaacagtagacccaccctccaaattatacaacacatccatacctaacaaacttcagacccacatcctacaaccctactaaaacacaggaacctcactccccatgcacactcacaaatacttcaacacactcctacacatgcagaccatagacacccagctcacatacccatatacgcaagagtcaaaatgcataaccatacgccaaacacacacctctgtgacaggtgcacagtcacgtgtaagcacacaaagacacacataagaggagacatatgcactgccatactgacaaacacaggaatatacacacaggaaaacacctggccaccacaacatattctgacccatgcatctgattacttatacatgtgcagatggtggtttctcatgcacatacaccctgcccttccctgccttctccctaagctcagctcctccctctgccccttccctttggcacagagtagccacaggatgtctaggggaagcacttctcagggacagaggcgggtcactgctccctccctctggcccatatcttggccaaaagttcccaaggaggtgccagtccaaaggctgaggtggccctgcgaagaggaagaggcggcggctgtggttgggaggcttgtggggcagaggcggggtgatgggggagaggaaggagatcctgggagggagagtgggagggaggctgcaggcagtcctactcaggctggggagtctgagggggaggtggtgtgaggcggtgaaccggcgtatctgaacctgggccctgtaggggccatgccccaggcccaccatgaacctggaagggctggagatggttgctgtgctcgtggtcctcgctctgtttgtcaaggtcctggagcagtttggcctctttgagcctgtctccttggaaggtaatccaggtgtcctggcatgtctgagctgctggctggtggggcagctgccccacagcactagggagggtgtttgtctgtcttcatgactggggcagggatgagcaggtgagtgatggcacagggatctgggaggtgagtaggggtgcttgggggatacaacatctgggaggggtgaagaggaggcctcaaggagtagatatggagggaggagggaatctgggggaccaaggtgtcaggaggtgatgaggggtgcagtgtgggaggactggggtgtggagatgaggaggtgaggggattctgggcgataccaggaggggtctggagatagggaaggagtgtctagagtagaggagggaggttctagggatcctgagataacaacggatttctggggggtcctttttggagtcaggggcccaccacggtgcctgtgcatcctctccacacctccatctgtgcagtgtagcttatggggtgtgtgggcatagtgtgtgagagacacagggtgtgactttgtgttcctgtatgtgagagagtacaaagtgtgtaactgtgagcctgtgtatgggacagggatatgactgtatgtgtgagagtgacagggcatgtggctttgtgagaaggtggatgtggccaggcctgagtggcacagtatgtggctgagcctctgggtatcaggttgtgcatgtggctgtttccagaatttcctgaggatataccagctccatacccaaggcttgggaggaggtgggttctggagggaagagtgtgaacattgtgaaggagacatttatagcccagctatgattggggatgaggagtggatcagatcagggaccctgcttcccaagtccccttgcctctccaagctcctatcaggatccaagtgcagagtgatctccagggcctagacattgggagtggaaaatcaactcccctccccagcccaccccaaagtcagtagggagagtaatattggggtggagtggggagcacttctgcctcccccttgggagttttgacctctccctcctcttcacggctagaactgtgtaactccgtagcatggctgttccccagtaccaccagggacaggaagacagactagaaccatgatggaggactgcagggtagatacctggaagaactggaaaaatatgaaggaaactgggaacaagaggaaggtgcatgaattgcctgctctagggttcagtaagagcagaaaactcctagctcaccctccatcctctgctgcatttattggggtggagtggggaacagggagttggacctagataaactgggacagctgggctgagcttgttctcattcaatctggaaaaggtgaagttgattgagctctaacttgccattccttttagatgggaaagggggaagagagggcatctggaaatcccaggagtcttgggctgaaggcagccattctgttctcacctttagaggagacagaggcttagaagcaggtagggggctggggtggggggcaggagagccacccccgagtcgggcaactacaccattggaggccccaggcgcaatccagctttgggaaactagagtccaggctaatggagccctgggccagaggccaggaatgccatcgatccccctgcctggcccactgcctccctcccacctctccatggctcctggggtgggagggaggtaaggatgtgttgaaggagaggaggtggttactcacccagtcacctcctgagaacagggcctgatctggagggtgaagcctggattgggagggtggggtatatggagggggagtaacctttaactaaaggaagttggacccctccaggaatggactgaggccaactttagtcactgtgtcagatccagtgggatctgatccaggaatctggatgcagtgcagctgggagacacagacacacacacacacacacacacacacacacacacacacacacacagtaacactgagggtcctctgggggtgcaattagagctgtagagcatgtgcagaaataagggagaagaggggaaggggagccatgatcagtgggccatggatagccccacaatacaccagaatactcgcctccaagatctcttattgccacaaagtttactattatttcaccctcaaagagcaagccatactggaagagactgtgaaggggccacagtttagggtagatgagttagctgatgaggaaccctgccctttggcagaaagattctgggcaccttggaatgaggaggggttacaggaaagaaaagtgggtgtacccaggaaaaatgaagcctctgtgggtgaggtattgaggtacagccttagatatctgggtgccatggggacccaggtcacagtatgatatggatatgtgtcatgacaaccttgatatgtctcataatgttataaggtcacaatgtcatagtgttctttgtagactcacatgtcatgatgtcccagaggcattgtgtgttcttgtgtggtttgatcatgctgtgtgtgagatggcctatatgggtctccatgtgtatgcatcctgttttacttaggtcacatttgtatatgtttgtgttaaggagttagcaggtcattgtgtgtgtgtgtgtgagcatgcatattacgccatcaggtgtgagttactggatatcaagctgtcactggcacccatcactgtgatgtattgttctacatgtcactatacacgcctgtcactgtaggtgtgtgtatgagagaggtgttcttacccaggcaatccttgggttggacatcatcctgagaggtccagccatggcacttgagccaagggtactaggtcagcaaagacactgaggccactgccacctcatccttgccgcctcgctgtcaccggccacgtcccattaaaccaagtgcctgagcctcacctctatggactcactgggctcccctaacccgattccaaccacccttgccattcctttcctccccttaattcctcccccagcccggtccccagatggggttgatttgtgactggcggggaggggacagggaacagagggacaatgggagttaatgtgccttcctggggtcttctctcttcccaggccaccctccagggcccactaaaaaagcgctgaagcagcgattcctcaagctgctgccgtgctgcgggccccaagccctgccctcagtcagtgaaagcaagtgcctctcatgtgcttccgggggcggggctcgatgtgtgcgtgcgtgtctgtgcatgagtgtgtgcgcgtgtgccccaggcctgcgagtgtgcgcatgctccaggcctgcatgtgtgggggggcgtgccccaggcctgcgtgtgtgggggtggggcctgccccaggcctgtgcgtgtgtatgtgtgtgcatgtgcgcgcgagcgtgccccaggccggcgtgtgtgtgtgggggggcgtgccctacccctgcatgtgtgtggagggcgtgccccaggcccgcgcgcgtgtgtgtgtgtatggggaggcgtgccgcacgcctgcgtgtgggggaggggcgtgccccaggcctgcgtgcgtgtgtgtgtgtgtgtgtgtgtgtgtgtgggcgtgaccagcgtggcgagggcgggtgctggcaaggctggagcataagggggcgtggctactgtgtgcgtgtgcggctgaagccagcgtgtgtgggcgtggtcagttgggagcgggtgtgtgtcaccgctcccgcaaaactgtgggacccgagagtgtgggtgtgaccattgtgaccaggctgaggcctgagcctgtgtagctgtggcggcctgtgtagaccaggcggccgtgagggtctgtatgtggcttagctgggttagtgtcttcaactccgtgcggccgcccccttccccaccgtgttttggacccctgatgtgtgttgcctatgccccgacaggatggtgacaggtgtagaggatggcgcctgccctcctccagacgccagggtatttgggttttctgtgccagcctggtcccctgctgagtgatctccagttgagtgacctcgctttgtctctaggtctccatttcctcagttgggccttgcccacctcataggatcatactgcattttgcaaaccataaaggcccgctttgtagttatttgagcatgctgttgtgttggacttagatgggtcccacacgggggtggattcggaaaaggacaggcgtgagtcccgcaagcttgtgtgcatggggtccgtttcgtgtgtgtctgtgctggttgggtgtgcctttgcacgggctgggttgtgaggtttgctctgagtgtgaggggccaggtgtgtgtctgcagttggccgggtcttccgctttctcggtgacagttcgctcccttcagcattagccgccccagcctccctccgcccccacagaccccgcctgctggacccaggtgacttacgctcctggtgggggcggggcggggcagggcggctttgccatcttggggtggggggcacttgcctgggggctggacgttgggggcggggcaggattgagatggggccgggggtggggtctggatggaggttggctgagctgggcggggcatggctcaggcatggctgggatagatggggctgggcggggcgaggggaggggctgggtgggacgaggggagggtttgggcggggcaaggctggggctgggcggatctgagttggtccccgaaggcccggagctctgaccctcagacgccccctcttgaactggcttttcccactcctccctttctaaaacgaagatgcggctgggggccttcccctccaacgagggatcgagggccgcggggcgagcactgagtcggatccctggctctggggccaggccaggccttggcccgctgatagacctcgaagatggccatcatcttttctccttacctcagtgtccttggctcggggcccagggaactggcagcctggtctccggcatcggatgggaccggggggcggggagggggtgaatggggcagtgatttgaagaggggtcgcggaggctgggcctgaggcgcggctgtcctcaccgctcccgcagacagcgtggacgatgaatttgaattgtccaccgtgtgtcaccggcctgagggtctggagcagctgcaggagcaaaccaaattcacgcgcaaggagttgcaggtcctgtaccggggcttcaagaacgtgagtgcaaggcgaggccaaactcagcgagggtgggacaggaggacccaagccggtccacagcttcccagaaagcatggcttggatgcttgaggtgtgggcggaagggaggcaaggccctgagactgaacttctagctggaggttctggggcggggccagaacggaagtggcgcctgtagactgtcagtttcgttccatgttttttatttgtgcactgggaaagaagtcttccctcccatcacatgagccacgtggtgagtcctctggaggcttgaagattatccccctccctgggagtcttgggccatggagggtgggggcggtgaacggaaggggattttgtctctgccctcagcctggtgccctctccttccaggaatgtcccagcggaattgtcaatgaggagaacttcaagcagatttactcccagttctttcctcaaggaggtgaggggacaaggcccaaggggaagcagttgtccttctctaggctgagggagggagggattctggaggagctgggaatgccaaggtgatggggggtatggggagctccttagagggaggaagtcctctcctgtgtggaagccaacttctccacactcaccctgcagactccagcacctatgccacttttctcttcaatgcctttgacaccaaccatgatggctcggtcagttttgaggtgagctgggcgaggtgggccagggaagcctgtttcctggagttcagggccaggatctccaggccaaacccagagaaggagttgggtgaagagtacccgaggacacagctccctcctgcctccttcccaggactttgtggctggtttgtccgtgattcttcggggaactgtagatgacaggcttaattgggccttcaacctgtatgaccttaacaaggacggctgcatcaccaaggaggtgcagggcaactgaagggctgggggtctgtggcggtgatgggggtggcgtgcagagggtgatgggagggaaatatgacccacatatgcccacaagcaagggatcaagggaggctggaggctctgaggaaggatcctcttctctcttggcctaacaggaaatgcttgacatcatgaagtccatctatgacatgatgggcaagtacacgtaccctgcactccgggaggaggccccaagggaacacgtggagagcttcttccaggtacttgggagtgggtaggctggagggccctggagtgaagggaagaaggccaagaaccagcagggaactcacctgacttctgtctgcctctctcttgccatccctcctgttctccctgcctgaccaccttcttgcagaagatggacagaaacaaggatggtgtggtgaccattgaggaattcattgagtcttgtcaaaaggtacagctccctgccctctacattaccctgacctggactcaggcctgatttagtaatgcagggaaaagcttctttgggaagaataccaccttcccacctcacccccatatttcaatcctattcctttgtgggaggcttaccccttccctacctcaggtctctctgggcatctccttcctctgtgcttttgaatgtccccgtctgtgactcagtgtccctctcactgtctctgataagctccttctctttctctctcttcaatctgcctcgctcacatcatggccacaggatgagaacatcatgaggtccatgcagctctttgacaatgtcatctagcccccaggagagggggtcagtgtttcctggggggaccatgctctaaccctagtccaggcggacctcacccttctcttcccaggtctatcctcatcctacgcctccctgggggctggagggatccaagagcttggggattcagtagtccagatctctggagctgaaggggccagagagtgggcagagtgcatctcggggggtgttcccaactcccaccagctctcacccccttcctgcctgacacccagtgttgagagtgcccctcctgtaggaattgagcggttccccacctcctacccctactctagaaacacactagacagatgtctcctgctatggtgcttcccccatccctgacctcataaacatttcccctaagactcccctctcagagagaatgctccattcttggcactggctggcttctcagaccagccattgagagccctgtgggagggggacaagaatgtatagggagaaatcttgggcctgagtcaatggataggtcctaggaggtggctggggttgagaatagaagggcctggacagattatgattgctcaggcataccaggttatagctccaagttccacaggtctgctaccacaggccatcaaaatataagtttccaggctttgcagaagaccttgtctccttagaaatgccccagaaattttccacaccctcctcggtatccatggagagcctggggccagatatctggctcatctctggcattgcttcctctccttccttcctgcatgtgttggtggtggttgtggtgggggaatgtggatgggggatgtcctggctgatgcctgccaaaatttcatcccaccctccttgcttatcgtccctgttttgagggctatgacttgagtttttgtttcccatgttctctatagacttgggaccttcctgaacttggggcctatcactccccacagtggatgccttagaagggagagggaaggagggaggcaggcatagcatctgaacccagtgtgggggcattcactagaatcttcaatcaacctgggctctccccaccccaccccagataacctcctcagttccctagggtctcttcttgcttgactcaatctacccagagatgccccttagcacacctagagggcagggaccataggacccaggttccaaccccattgtcagcaccccagccatgcggccaccccttagcacacctgctcgtcccatttagcttaccctcccagttggccagaatctgaggggagagcccccagagagcccccttccccatcagaagactgttgactgctttgcattttgggctcttctatatattttgtaaagtaagaaatataccagatctaataaaacacaatggctatgcacag

SEQ ID NO: 235 - DNA, 61022 bp, Homo sapiens
  source 1..61022: mol_type = genomic DNA; note = NC_000005.10:40679915-40740936 PTGER4 [organism=Homo sapiens] [GeneID=5734] [chromosome=5]
acagagggtggaaaggcgagagcggagctccaagcccggcagcccgagaggaagatgaacagccccaggccagagcctctggcagagtggaccccgagccgcccccaggtagccaggagcggcctcagcggcagccgcaaactccagtagccgcccgtgctgcccgtggctggggcggagggcagccagagctggggaccaaggctccgcgccacctgcgcgcacagcctcacacctgaacgctgtcctcccgcagacgagaccggcgggcactgcaaagctgggactcgtctttgaaggaaaaaaaatagcgagtaagaaatccagcaccattcttcactgacccatcccgctgcacctcttgtttcccaagtttttgaaagctggcaactctgacctcggtgtccaaaaatcgacagccactgagaccggctttgagaagccgaagatttggcagtttccagactgagcaggacaaggtgaaagcaggttggaggcgggtccaggacatctgagggctgaccctgggggctcgtgaggctgccaccgctgctgccgctacaggtgagatggcgttgggctgacgttggggtcaacgggtagagaacgcagggatgcggccctcgccgaagagagccaagaagggaagagcgcgctctccaaattgcttttgtaacttgttttcagtgagcattttattgattcagaatctatcgagaatagcactagcgagctacttttcccttgagatgggtcttattcatcttggcaatggagtgagttggattgtggggaggaagaggaatgggaaaatcagtttataaatattaatgtcagcaagagtgtgctgttggcaggacgtatcgcgagcctggagattttggtggccgcagttggtaagtggctacaatccagaaagtaggatcgagttgctccccttgtcttatcagtgtatcgtttctcgggcgcgggtctaacaccttacaagtggtaatttccgctcacggcagctttgtctctcttctaccatccccagacccagccttgcactccaaggctgcgcaccgccagccactatcatgtccactcccggggtcaattcgtccgcctccttgagccccgaccggctgaacagcccagtgaccatcccggcggtgatgttcatcttcggggtggtgggcaacctggtggccatcgtggtgctgtgcaagtcgcgcaaggagcagaaggagacgaccttctacacgctggtatgtgggctggctgtcaccgacctgttgggcactttgttggtgagcccggtgaccatcgccacgtacatgaagggccaatggcccgggggccagccgctgtgcgagtacagcaccttcattctgctcttcttcagcctgtccggcctcagcatcatctgcgccatgagtgtcgagcgctacctggccatcaaccatgcctatttctacagccactacgtggacaagcgattggcgggcctcacgctctttgcagtctatgcgtccaacgtgctcttttgcgcgctgcccaacatgggtctcggtagctcgcggctgcagtacccagacacctggtgcttcatcgactggaccaccaacgtgacggcgcacgccgcctactcctacatgtacgcgggcttcagctccttcctcattctcgccaccgtcctctgcaacgtgcttgtgtgcggcgcgctgctccgcatgcaccgccagttcatgcgccgcacctcgctgggcaccgagcagcaccacgcggccgcggccgcctcggttgcctcccggggccaccccgctgcctccccagccttgccgcgcctcagcgactttcggcgccgccggagcttccgccgcatcgcgggcgccgagatccagatggtcatcttactcattgccacctccctggtggtgctcatctgctccatcccgctcgtggtgagtgaccggggctggggccctactcggcctttttctcgcatccacctcccgcgtccattccccgctccctgctttccctctgagtccttggcagtgaacgtgtcgcctttaggtcggggctgggattcccacactgtttctcagagcaggcccaaccctctttgaagtcccaaccctaacgagatttagcaggtgctttgcccctacatcccccagtttatgttcccggaagcctgggtttctttctccaccgagacagcccttaccccttgctgcctgacactggccgagtcttccaagaaaaccccccgccccctctgttagacgtggaggggagcctgctgtagtgtgacttagcccattcctccgtactgtgaactgtgaactgcaaaacctgaaatgtcagggatggtgatctgttcgttgtaaaccatttttaaggaaagtggggtttttggtgttttgatgtatgcaaggtttcttgaatttcttcccccgtggattgcgtagaattttaaagctagaagagatatcaagaggtgttttagtctaactccctcacttcactgagggagtgaatgatacgcttaaaataatccagccgaacctacacagtcaagctaggctccctgctctttaccatggtgtgccctgggagggcagcttaaagcacacaaattctaattcatatacagggcagggtccagactcagtttctttcattctgtctagaccaggaaagcaaagtttctcagggtgactaattatggacaggctgatatacatagggtatgggatttgaattctcgacaactgtgcgaggtacagtaccattttagagaaaccgaggtttagagatggctgtctttgtttcttcaagccaaagctctacagcttgtaatggaccttaggccgtctgaggccagacccagctcatgtgttattacatcacgtctccctcgtagaacatttctcattttggcgtttgtaaagcgtgggttggagttttggtacacttcatttttagttcatcttttaagaattgcctttggattaacttttaaaatatgataaacagaaaggctcaaaccctacctagttttctactttgcctgtggctaaaatggaatgcaccagaagcagatgggcagaataatgcaatactttatctagagtttctcttgaaagcaactagttatgagttcttccatcttccaaaacactgcattcctggaaattctaaactaccaactcaaaaagagataactgctttttcttatgcttgttgggaacaagagaatataaaatgtaatgggctattattccttccttttccttattgatactgtccagggatctttggtgtaaaaatatatctttgataaaagtgactgtaaatggaaggaacttagagggggctcagagccagaatacagtaggttcttaccaatttgtataaacagaagtaaatataataggccataagagcctttaagccattccaggacccaatataatttacagagttaagtcacacttgagccacataaatatattttactgtctgtaatggcaacctagaataaagtgagattttggaagaaacaacactgctcctgatggggcccctgttcctgggcctctgccttgtgttttacagaacagtaaatgacaaagtgaatggttgttattttcagaacatccacttaaagggacagaggaattagagctagaaggttagcaacatgcacatactttataaatgtgttttggttggaagtaagcatgtaaagctatggatttctgcacagccacggatgaattattttcttccaacatctagagagacatacaaggcttaattcacctcataggctgaagtggtagacctggacctaagattcagggcccttacacaaagccttgaaattatttgaggacctagaggcaagaaattataggagctgtatttgtggtttgcagattaaccacattttaactaacaagaaatactgtccacctgtataatgttagtaacgtgtagtaaattttaagtaatcttgacctgaaaattgaaactagctcaattaagaagtaatcccattagtcaagtatttatatagctttgtgagaaataaggaatcctaaaatagcagtggcatcagtttgtcgcctttagttttggctactaaagtctaatttcagaatcagtttaattataaattagtgataaatgatgggttcattatgccacccacccacccccccccccacaattcagcaattactgaaataatcaaaaacccttccgcaaatacagtcttccttggcttccttttacaactttcttttttcatgttttcatattcatgttgtaaattaagattaaagctcagaactctctgacattgaaagcagttgagcttatcttcagttccaaagaaactaatgaagcatctaattttatcaaatcaagtggttgctaatcccatttaaggaaaatcaaagcgttggaatcattttaaatgctttggaaaggctaacaaagcaaatgtagtttacttggaatttcagaaagcttgatataatacctaaggaaaacaagcagccactgaaaagcagccaaggttttgcctcctggacaccagggaagaaagagctacagctcttagaggggggttggtattgagtttagtataaaaaataaattttaatttgctatccaaaatatacatatttcataaatagagttaagattggagtggaaatttgagaaaggttgggaaattagttgtggatataaggaactgtgctgaacctgcagcattctttgaactgggtcataattaatgatcagagaaggtgtaagtatgatctacaaggaacatcacatgacaagatttagtgggtaggtggttcttgtcattttgtccattcttctatttataaccagtctcatagtttttttaaatataggagaattttggaagtgagaacttctaaaattttgtgagaacaagaagtgagagtctacatttaagataaacgaaaaggattgaattctttagaaatatgcaagcaagacagcctcctaaggtcctggttttaaatgctgtagcttgatgaattactagtgcctaattttgcagttactaatgaatattaagatgattattataatcaaatattttgccttagggctaaacagttactatagggtttcgaaggtcattttcccccatacacaagcaacccaagactgtatttattgcttacttgtttcttttattttttaactctgaagtaacaaatactcatctcagctaggggcagaacagctaatttgattaatcttctgccttggtgaggtaaaacttaggtccttaggaaaatacttcctgtgactgtttatttggttccttactataaactagttgtctctataaagctttcaccagcatttgatcagcaaaagtttataaggacagataaaaactttgtaaatagatatgcttttgtttactgtaggcaaactggaagtggagtcataaaacaactgatgggatgtcagatgagtgtgaagcacatctatacatacaagagaaatgccacaaatttgggtatgactatgacagaatctaaaagactggatttgttcaaataaatttggctaagtttaaaaaattgcaatgcctagaaggaagttttaaatcataacatgcaattgcagacccagtagtagtaacctgaagactattgagtaacataaaagtaagttatttccacatctggcatttcatttgaatcttgaaaagctctaaggagaaagtagggctgaccagtattttcactctctctacacctcagtttcccaagctgcaaatgaagaatttatatcattctgcaacttacagggtagctataggtgagtcctcgtctaatgctcatttcaccatgctttcttgacctgtcaatttgtttgtattgaatatctcctaacaagattttttttctcagccctgacgtgattcttgtagtctcctatcagaatattcaatgtgagagctttaaaaacaaacaaataaaaaaaaacagaaactttcagtgtagaggttgacctataaagcctgtagagatttaacttgccttctacaaatggccagaagaagaaccaagctctcctacacaccacccagtcaataattatttccactattctttacttgaaaaaaagaaagtgataagaacttctagtaacagctgtgtcaattttggactcttaacaaggcagtgggataactgagcccatacagataattccttttatgtgcttggaacagaacaagtagcacacacattcaaatccagctacagatcttgtcacttattggaaagcgttactgttttgacagtccattactaaatctaatcaagagttcaacattctttcttcaacattccctgcaaacaaattattaagtaggaagtacatgtttttgataccatattattaactatatcccaaagctacctctaagctacagttttcaaattattgataccttccacactgggcaagcttccacatatgggttgaaagaaaaagtaatgagagccaacatatctgttatacgataggcactgtactaagcactttaataatttgtacatacgttataagggcagagccaggatttgaacagaggcttgtttgcttccaaagcttgggcatttatctctacagcatatagcctccttacagctttcttgtcaccacatcttcttctgaacttattgcatttcctcaaagttatgttccactgctcctgagccctaatctctaatcatcctaaaaaaaagtgtgaataacataatttaaaaaaaattaggtgggtgtggtaacatgtgcctgtggtcccagcaacttggaaggttgaggctggaggattgcttgagcccaggaggttgaggctgcaatgagccatgtttgtatcacagcactccagcctgggtgacagagtgagaccctttctaaaagaaaataaaataatttagaatactgtaatatgccaatattaacaacaaaccacatgtacacagcaggagctactagaaaaagacttaaaattggaagaaaggagatacgttgtttgtattcagtgagtttttttgtttttgtttttgtttttgtttttgttttgagacggagtttcactttgtggcccaggctggagtgcaatggcgcaatctcagctcaccgcaacctccacctcccgggttcaagtgattctcctgcctcagccttccaagtagctgggattataggcatgcaccaccacgcccggctaattttgtatttttggtagagactgggtttctccatgttagtcaggctggtctcaaactcctgacctcaggtgatccgcctgcctcagcctcccaaagtgctgggattacaggcatgagccaccatgcccggccatattccctcctgactcggaggttcagttttatcagcaacacactcttccaacactgaaaactgcctgaacttgtttaattatgtaaaatatagggcctgttggacaagaattccgaaaagtgctttcaccccctcacgagacattgaagcactactccggatgtccccatctcaactggggttgtccctgccctcttggaaacagcaaatcaagtagcctacttaaagtgaagcagaggttgctctatgttttcaaacattgcaagatgcgtggagtttttgtttgttttgtcttttttctttccctacttgaagtaagtctcaattgaaatacgctgcaaagtaaaactcatattgattcttttcaatctaaccaacttttgaggatgtttttacctgaatttggacttttgctttttaaactcatacttttactaccctgtgaactcccctttattgaaaagacattgaatgaccaggttcagtggcttgtactaattgtaaacttttcctcccccatggaaaactttaaaatagagcatacttttaatatagcctcctttcattccctcctatactagtcgaaatccattgctgctgtggatgagatgaggcacagaaatgattctttccttgcctctcatcacctttgattatgaaaacctattattaattgttttacaacattccaacctttctaaaaggccacagaaattttaaaatgctaactcctaatgtacttctttgaatggctataaattccattttaactattcaaaaattttcttcctttcagtagtagccatgtttcctttgaggttgtggtaggagaagcaaccagcaataaaacattttcagtgtcaaaaatctcagaaacgtcaggttcagacttaaccaaaattctgttctgcgagtctcggagatggctttacacagtgcttgttagggaggtagtatcagaaactctcaagtggagcaacactgccacctggaggcttgaaggctcaagttcgcataaacccggccgtaggtcttttccagagaccacacacaggacttgatactaacagatttaacgccatcatttcttctacccttaggaacgtagtatgtgatgtgaataaaatatagacctcatgctttttaccaacaattccattgtcaggaaataataattaaacagaaagccagactggtagaacagaaaaggcaacatggaggtccagaccagactctgccaccaacagggtgggggacatcctaagttcctcaaaacctctgggtctcagtaacaaatacctcatctgagaaaaggcctgtagagttgagggaactgctgagtttccaggcatagctgaagacctcaaagcttatggaaggaagaaaccaagatgctttattttactttctgtaaagatttttttttaaatcaagtatgctttgccttgatactatcatttatcccagcgtagtttctaaaagtatttcaagaggcgatattacacactgctgttcattctagttcattcttgatttagctgtcttccatataggaagatattaatttcatcttggttagaggcatgtcactattttattctctgagatttacaggcccataatcccatatccaaaatatttacgggcagatgagtttcagaattcagaatttcttggcttttagaaaagtaatcaataatatattgcaaaatatgtaatatccccatcagaactggaacagtaatcctggaccagaacataggaatattcactctaagtggaataaattgaactaaatggcttcacagtctgttcagttcagttttgctgccaaaataagtttaggtcagattttgcaatgagtgtaagttctcaaaacaaaacaagtgaataacaacaaaacaataacaaaggaaatgaacaaaaatcttttgagagaggatcagagacctatagctaattaagatctaaattccagttaaggaagaaaaagaaatgcagttctaccttactgatccagtatcatccaggagtaagtttaatataagcttgattttgcagattaatgaaatgtatttcttcgaatattttaaagattcaaagaatctttaaaggaagaaaaaaataattcttccttcttttacccaaattttacccaaattgttgaaaatctttctataatatcctgacccaaatattgttacatctagtaagtgccaaaggaacacatgcaaatggtcaatgaatcgccttttccgttgtgaactgactcagcctcaactaaactgtccctgttccaggtgattcatacaccatgagtcattcattgttacgctgtatatagtaaggcagcaacatcctcaagtcttgttagagatatttgcccctagttaaatggctccagctatgcttttgttagttctttctcctttttgtggtttttatgtatcttccttgactgtgagactcaacctcttctccctaacctaaaataattactaaaggcaagaaataattactaaataattacttaagatatatggcaattatttttatttctatactactatttctatttctatttctatgtgaattaccactactactatttctatattaattacagatgagatttttatataaatgatcccagtggaattagaagtaatatctaggcaaaaaaaaatcataatactttaagagtaaatttgaggctgaacatggtggctcactcctgtaattttagcactttgggagactgcagcgggcagatcacttgagctcaagagttagagaccagcctgggcaacatagaaagacctcatctctacaaaaataataacagttagccaggcatgatggcacacacctgtagtcccagctactcaggaggctacagcaggaggattgctggagcctagggggtcaaggctgcagtgagcaatgattacaccactgcactccagcctgggcgacagagtgagaccctgtctcaaaaatatatatacatgtacatttaacaaatgcattttcccctaaggattaaaatgatcatgtaagtttacacaaattcatgctccattcgctgaatcatttgaagttcccagatgttgacatatcatttcattcttccatgactttgcacatggagctacctctatttgaaatgtgatgtctttccttctaaatttagcaaattctcattcatccgttgtgattactataactggggaacagagtcatagagaaaataaaaactattctctggtcattctgggtaacaggagatcctgctgttggtgtaaaacttttcagcatattctttctagactagaataaaagaatcttggccttattctggtgattagatggttaattgacttataaaatgagtttcctttaaattatgtaaaatgacagctggaataagaaatcagtagcttttgggggaaaaaagttacttcattagaattacaaaaacttaaaagcactcacagaaatgaagttaataaagtgcttctcaagaacactttatacatatgtgacctgcactcacattgcatttttgtatactgtctttgctctagggaagataatcataagatagttacaaaaatattaaagctatacgaactcagaacatgtaattgcatttttgcagtgactggtttttatttttttattttttatttttaaacagattcttgctctgttgccctggctggagtgcagtggcatcatctcagctcactgcaacctccacccgccgcattcaagccattctcctgcctcaccctcctgagtagctgggattataggcgtgtgccgccacacctggctaatttttgtttttttgagacggagtctcgctctgtcgccaggctggagtgcagtggtgggatctcagctcactgcaacctccgcctcccaggttcaaatgattctcctgcctcagcctcccgagtagctgggactacaggcgcatgccaccacacccagctaatttttgtatttttagtagagatggggtttcaccatgttggccaggaggttctcaatctcttgacctagtgatccgcctacctcggcctaccaaaatgctgggattacaggcgtgagccaccgcacccagcctaatgtttgtatttttagtagagatggggtttcgccatgttggacaagttggtctcggactcctgacctcaagtgatcctcccacctcggcctcccaaagtgctgggattacaggcgtgagccaccgtgcccagcccatgactggtttttctgaggcttattatgtagcttcctcttttcctggaacttgttaccagaaatgaaggcagcttcctaatattgataaggtagacatagcatttatatgttttcccaattgattaatgatgaaatctaaatgtgcgatctcacttatgcaggtgcgagtattcgtcaaccagttatatcagccaagtttggagcgagaagtcagtaaaaatccagatttgcaggccatccgaattgcttctgtgaaccccatcctagacccctggatatatatcctcctgagaaagacagtgctcagtaaagcaatagagaagatcaaatgcctcttctgccgcattggcgggtcccgcagggagcgctccggacagcactgctcagacagtcaaaggacatcttctgccatgtcaggccactctcgctccttcatctcccgggagctgaaggagatcagcagtacatctcagaccctcctgccagacctctcactgccagacctcagtgaaaatggccttggaggcaggaatttgcttccaggtgtgcctggcatgggcctggcccaggaagacaccacctcactgaggactttgcgaatatcagagacctcagactcttcacagggtcaggactcagagagtgtcttactggtggatgaggctggtgggagcggcagggctgggcctgcccctaaggggagctccctgcaagtcacatttcccagtgaaacactgaacttatcagaaaaatgtatataataggcaaggaaagaaatacagtactgtttctggacccttataaaatcctgtgcaatagacacatacatgtcacatttagctgtgctcagaagggctatcatcatcctacaactcacattagagaacatcctggcttttgagcacttttcaaacaatcaagttgactcacgtgggtcctgaggcctgcagcacgtcggatgctaccccactatgacagaggattgtggtcacaacttgatggctgcgaagacctaccctccgtttttctactagataggaggatggtagaagtttggctgctgtcataacatccagagctttgtcgtatttggcacacagcagaggcccagatattagaaaggctctattccaataaactatgaggactgccttatggatgatttaagtgtctcactaaagcatgaaatgtgaatttttattgttgtacatacgatttaaggtatttaaagtattttcttctctgtgagaaggtttattgttaatacaaggtataataaaattatcgcaacccctctccttccagtataaccagctgaagttgcagatgttagatatttttcataaacaagttcgagtcaaagttgaaaattcatagtaagattgatatctataaaatagatataaatttttaagagaaagaatttagtattatcaaagggataaagaaaaaaatactatttaagatgtgaaaattacagtccaaaatactgttctttccaggctatgtataaaatacatagtgaaaattgtttagtgatattacatttatttatccagaaaactgtgatttcaggagaacctaacatgctggtgaatattttcaactttttccctcactaattggtacttttaaaaacataacataaattttttgaagtctttaataaataacccataattgaagtgtataatataaaaaattttaaaaatctaagcagcttattgtttctctgaaagtgtgtgtagttttactttcctaaggaattaccaagaatatcctttaaaatttaaaaggatggcaagttgcatcagaaagctttattttgagatgtaaaaagattcccaaacgtggttacattagccattcatgtatgtcagaagtgcagaattggggcacttaatggtcaccttgtaacagttttgtgtaactcccagtgatgctgtacacatatttgaagggtctttctcaaagaaatattaagcatgttttgttgctcagtgtttttgtgaattgcttggttgtaattaaattctgagcctgatattgatatggttttaagaagcagttgtaccaagtgaaattattttggagattataataaatatatacattcaatctgagttgcatatcctcagtttgggaaaacttgtgggggcttttttgttgtttcaggtcatcatctatatccttttatatatttttttaaaatttattgtgaaataattttaaagaaatattgcaagaaaagtacaaactcttgtatacacttagtagagaatgacactttactcaaagcctccagtttgtatgggtgatggaggagacagtattatgcttagcttgtgacatataaaggactcaaataattattactaaaatgagcatattttaaattttgcagtttttttaactgccatttttatttttatttttttattttttatttttgagacagagtcttgctctgtcacccagactagagtgcattggcacaatctcagctcactgcaacctccacctcccaggttcaagcaattctcatgcctcagcctcttgactagctgagattacaggcgtgtaccaccatgcccagctaaattttgtgtttttaggagagacatgtcatgccatgttggccatggttggtctcaaactcctggcttcaagcagcctgcccacctcagcctcccaaaatgctaggattgcaggcatgagccaccatgcccggccatttttacatttttaaatgcaaattttgttcattttttgagtgagttatatatctgcattagtcagctaaggctgccataaaataccacagatgggtggcttaaacaacagacatttattttctcacagttgtggaggctggcagtccaagaccaaggtgtcagcagggttggtttctcttgagccccctctccttgacttgcagatggctcccttctttctgtgtcctcagatagccttttctccaggtgagcacatccctgatgtctctctctccttataaggacactagtcatactggattagggccccacccttatgacttcatttaaccttaattactctcttaaaggccttctctccaaatatagtcacaatgagggttagggcttcaacaaatgaattttgggggcaagtgtccttttcattgttgagcctgatttattcttaaaatagcaaccaagaaaaatgaattccagcattgctcagtcatctattccatatttatttgtaaaacttaacagctatgcaatgcaaagattattttttgtttcttgctataggacacttgttccagaccatttagagaacttcaaattttctacacaggaaagttctgattgtctaattggctactattaaatcctaccatctcaaaaggatataacagacaagaaggtaattttaacaccatattgtaatctttgagacaatctaaccgattagatcaagtgtgttagaaaagatagatttgcaggactattaaaatggtactttaggccaggtacagtggctcacacctgtaatctcaacactttgggaggccaaggcagtggatcacttgaggtcaagagttcgagaccaggatggccaacatggtgaaactctgtctctattaaaaatacaaaaattggccaggcgtggtggcttacacctgtaatcccagcactttgggaggctgaggagggcagatcacgaggtcaggagtttaagaccagcctggccaacgtaatgaaacctcatctccactaaaaatataaaaattagacaggcatggtggcgggtgcctgtagtccagctacttgggaggctgagtgaggcaggagaatcgtttaaacccgggaggcgggggttgcagtgagccgagatcgtgcgactgaactctagcctgggcgacacagcgagactgtctcaaaaaaaataaaaaataaatacaaacattaactaggcatggtgccgtgtgcccagctactcaggaggctgaggcaggagaatcacttgaacccaggaggcggaggttgcagtgagccaagatcggccactgaactccagcctgggcgacagagggagactccgtcggaaaaaagaaaaaaatggtactttgtgcggtcataaaaaagaatgaattcatgtccatatcctttgaaccaatagaatgaaggtaaagaccactgtcctaagtgaactaactcagaaacagaaaaccaaatactgcatgttctcacttataaatgagagctatacaatgggtacacatggtcataaagatggaactgatgctggggactccaaaagtggggaggtgggggagagcaagggttgaaaaataacctactgggtactatgttcactatttgggtactgggtacactagaaacccaatccccaccagtatgcaatatacccatgtaacaaacacacgtactccccgaatctaaaataaaatgatgaaataaaaaataaaatggtactttgaccaagggaccacagaattcaagagttctttcccaaatcatagctagtcctctccacaagttttctcctaggggcatgaatacaaaagggacatggaaaaatcaaggcacagtaatatttactgttagctatccatatggcctcaaatgttaatgcagaaaaatttccattacacaaacattcagttttcctaaagtacttgtactagtctcagaacaaaccatgtttggtttcttccaatactgcccccacctcatgcccttctcccgttacatccaagcctgaatctaagatgctgcaattatgatctcaagattgtcatccagacacatgagaaatagaacccaaaaaaacaagacgcttacaacaagagagagcatttggtcccattgcttactgtggggtttctctgggctacagctggtgctttagccccaaactggaagtaccttggcagaaaggaagagagaaagatagctgggtctttggtccttctatcaacatctctaccattcaatcatttatccattccctttaccttgccaggccatcaaccccatttcccaccatggaagagaaggacagaagagaacaccagtcacttttcctaagaacgtttaaccacagcaactctacacactaaaatctgaacaattaggtaagtatttctctttcttgagaaggggtgaaacaggatttaatacaaaggaggagcaaaaagaattccaagaacaatgaacaagaactcaaggcaacagctctgcaatagggcaagagcacagtgaaaccatactgaggcaggagggaagtctctgtgatgtccccatggtaagaaagaaggaaagagagaaagagagaaagaaagagagagagagaaagagagaaagagaaagggaaagaaagagagaaagaaagagaaaacaaagaaggaaagaaaggaaggaaggaaagaaagaaaagaaagaaaggaaggaaggaaggaaagaaagagaaaagaaagaaaggaaagaaaaaagaaagaaaggaaggaaggaaggaaagaaagagaaagaaagaaaagaaagaaaggaagaaaaattaagaaagaaagaaaagaaagaaagaaagaaaaagaaagaagaaaagaaagaaagaaagaaagaaagaaagaaagaaagaaagaaagaaagaaagaaagaaagaaagaaagaaaaagaaaggccaggcacagtggctcacgcctgtaatcccagcactttggaaggccgaggcaggcggatcacctgaggtcaggagttcaaaaccagcctaaccaacatggagaaaccctgtctctactaaaaatgcaaaattagccaggcgtggtggcgcatgcctgtaatcccagctactcgggaggctgaggcaagagaattgcttgaaccccggaggcggaggttgcggtgagctgagatcatgccattgcactctagcctgggcagcgagcgaaattccatctcaaaaaaaaaacaaaaaaacaaagaaaaaagaaaaagaaggaaaagtaatagattatttgatgtttggcaaaatcaaagggagtgttatagttctattagaaaaattagtaaaaatatacataggaaactaatgaatttaaaaaaggcaattattgactccatgaaaaacaaagagaggtggaaaaaaggcaaaataaacataatatacaaggtgaactaaattatgtgtaataagtatactcatatcaaataatgaatatacagtcaggtacagcggctcacacctgtaatcctaaagctttgggaggctgagacaggattgcttgcacaaactccttttgtgcagccataaaaaagaatgaaatcatgtcctctgcagtagcacaaatggaactagagaccattgtcctaagtgaactaactcagaaacagaaaaccaaataccacatggtctcacttgcagagttcaagacctgtctgggcaacacagtgagagaccctgtctctacaaaaaaaaaaaaaaaaaaaaaaaaaaaccatgaaaaattagccaggcatgggggcatgtgcttgtagtcctagctactcgggagactgaggcaggcagatctcctgagccatgaatttgaggttacagtgagctaagatggtgccactggacaccagcctgggcaacaaaccaagaccctgtctctaaaatttaataataatcatcatcatcatcataaacatagattgaaacctaaattataattatactgagaatgaagaaagaagtagtaaatatattggggaaatacaagagacctaagttatagttatactcatcagtataccagtacttaatgtcctaaatttttaaaaatgaagaaatagcagtgaaaccacaataatatacccttatactccaaacatgtttgcaaaatatgtaaagtatgaaaataccaagtatgcttcaaaaaatatactgttcttgggaatacaaaattgatacaaccactttgaaaagtgaactaaagttcaggatgtatatgccatcaatgaaaacagtaactgccgagattgaaacacatcaattatatctcaatgcattactttatgatacgacaaaacaaaacacctcattggtcacctttggaggagtctagggagacaactaattattttgaaaagtggtaagaagacaaagaacaaagcgtttattatataaacggcctttactctgtagtttttccagcataagaaaatagttgatgagggaaagtttttctttaaagttttctcgtaccaaaagagtaacagaattatcacgtttgtagccactaatgaaataatggatctagacaatcatagtcaatggcttctgacattacaaagagaaataaatagcaagaaatatttaacttctagtaatgtacccatggccacccatgatgtattcttgccgaaaaattgaatgaatctgatcaagcctctagatctaagtccaattaagaggaaatataggaacagaaaaaacagtaatgacatcaggtacaatgccataggcaaaatataaaatgtggaaaattctaaaggacaaatgagccagttcctttaaagataagttggaaaaaaaaaaaagaggaatgggaagtcacagattataaaggatgaaaagacatagcaatagattcaattaatggacttttttggatcctgatttaatcaaaccacactatcaaatgtgatataattcataatatttacacaatagctatttttaaaactgaattagtaattaaaaactaccccgcaaaaaaactgtaggcctaagtgattttatttgtgagctcttttaaacattatagaaagacatgacaccaaatctatagaaactatattgaaaagagtaagtgaaaatacttctcaacattttttatgagggcaacatatcatgacttgaaaaccaaagatattacaagaaaaggaaactataggccaatatccctcatgaacacagacacaaaaatccttcataaaatgttaacaaatggaatcaagcaatatctaaaatggataatcatcatgagtaagtagggtttatcccagaaatgcagttgatttagtatctgaaaaataaatgtaacttaccatacaaacagaataaaagagaaatattatctcatagatgcaggaactacaattaacaaaattcaacacccattcataataaacaggtgttcagactagtaagggaactttctcaatttaattaaaaaaaagtataaaaatctacatcaatcttcacacttcatggtgaaagactaaaaagctgtatataaagaatgtttattctcacagtttgtgtgtactgaaagtttagcaagtgcaataaggcaagagaaagatataaaagacatacagtttggaaaggaagaaagaaaactctctttattcataaagacatgttaggtatgtagaacattccaaggaatctataatatagctaatgtagctaacaaatgaattcatcaaggctacaaggtcaatatatacaaatcaattgtatttctatgtaatagttatcaaaattggaagatgaaaattttaaaagactccttataattgcatcaaaaatgtgaaatatttagggataaacttaaaacatgggtaagactgagtcattgaaaactaaaaagcaggtccacaaggcctgggcctccagccacccccgacccagagctgtcaagccagtactaactcagcaactccctggacagagcctccagcggcagctgaaagcctctctgccactgcctctgcagtgaaactgcccttgccacccttggactaacgaaggagcaaagaccctaagttccttatccacaactccaacaagtgcagtcgacccaaggagaggaggccagtccatctcccatgggttgcacacactccccatggctcgtcaccagacagggaacccctggcttgggctgactgcactgagtgattcctgacctgcatttctctggggtggagccctcaggagtcaagcaaatgacctttggccacaaccactaataagatatcttcctctgctgactctatgatggggaaggaacataaacactgagattgccccagagctgcagtaggcagctcaggagtgccaagttgtgaattacagccagcactcaaggggtagaggaacccacaccttcagagcactgaaagggaacatggctgcaactatgaggaaccataggggagccacacaactgagcaagaatctaccaactgaccaataagcctaagtgtcacctgctggatcacaccccaaaacttcaacaccaaaaatacctcactaacataccctgactctgaaaccagagacaagaagtcactttcaaataaagaccctacataaagcctcagcccagtgaaaacatccagaaaagaagcctattgactgtactcaatctacactgcagttaaagaaacatccacgtgcagagatgagaaagaaccaatgcaagaactccagtaactccaatggtcagagtgtcctccaaacgactgcaccagttctccaacaagagttcttaaccaggcttaactggctggaatgatagaaatagaattcagaatatggataggaacaaagatcatcaagattcagtaagatggcaaaaccaaatccaaggaaaataagaatcacaataaagtgatacaggagctgaaggatgaaatagctggtatcaaaacgaacctaacaggtctgacagagctgaataacacaatacaagaatttcacaatgtaatcacaagtattaacagcagaataaaccaaactgaggaaagaatctcagaacttgaagactggttctctgaaataagacaatcagacaaaaataaagaaaaaagaatacaaaagaatgaacaaaacctctgagaagtaggggattatgcaaaggggccaaatctatgaatcactggcattcctgacagaaagggggagaaagcaaacaaattagaaaatatatttcaggatatcatctaccaaatttctcaatcttgctagggaggccagcagtcaaattcaggaaatacagagaattcctataaaattctgcacaagaagatcatccccaagacacataatcatcagattttccaaggttgaaatgaaagaaagaatgttaaaggcagacagagagacagtgcaggtcacctacaaagggatccccatcaggctaacagcagacctgtcaactgaaagcctacaagccagaagagattgggggcctatgttcaacatcataaagaaaaaaatcttcaaccaagaatttcatattcagccaaactaagcttcccaagtgaaggagaaataagatccttttcagataagcaaatgttgagggacttcatttccaccagatctgcttacaagagatcatgaaaaggaacactaaatatagaaaggaaagacctctagcagctggtacaaaaacacaaacacagagaccagtgtcactataaagcaaccacacaaacaagccaatataataaccagctcacagcacaatgacaggatcaaatccacacatgtcaatactaaccttgaatgtaaacaggccaaatgtccaacttaaaaggcacagtggcaagctggataaaaaagcaagacccaatggtatgctgtcttcaagagacccatctcacacataatgacactcacaggctcaaaataagggatggagaaaaagctaccaagcaaatggaaaacagaaaaaagcaagggttgcaatcctaatttcagacaaaacagatttcaaaccaaaaaagacaaagaaggcattaccttaatggtaaagggttcaattcaacaagaagacctaactgtcctaaatatatatgcacccaagacaggagcacccagattcataaagcaagttcttagagacctacaaagagacatagattccagacaataatagtgagagacttcaacacaccactgatagtattagacagatcatcaaggcagaaaattaacaaagatattccagacctaaattcagcactggaccaaatggatctgatagacctttacagaagtctccacccaaaaacaacagaatatacattcttctcatcgccacatggcacatactctaaaattgaccacataattggacataaaaacaatcctcaacatatctaaaagaaccaaagtcataccaaacacactcttggagtgcagggcaataaaaattgaagtcaacacaatgaaaattgctcaaaaccataaaattacatggaaattaaacaacatggtcctgaatgacttttgagtaaataataaaattaaggcagaaatcaagaagctctttgaaaataatgagaacaaagatacaacataccagaatctctggaacacagctaaggcagtgttaagggaaattcatagcactaaatgtccaaatcaaaaagttacaaagatctcaaattaacgacctaacttcacaactgaaagaaatagagaagcagaacaaatcaactgcaaagctagcagaagaaataacaaaaatcagagctgaaaatcaagaattcaaaaacattcaaaagatcaacaaatccaggggttggttttttgcaaaaaaaaaaaattaataaaacaggccaatctacactaattaagagagaagatccaaataaacacaattagaaatgatgaagagaatgttactactgagctgacagaaataaaaacaaccatcagaaactactatgaacaccactacgcacacaaactagaaaatatggaagagatggataaattcctggacacatacaccttcccaagactgagccaagaagaaatcaattccctgaacagaccaataacaagctctgaaattgaatcagtaataaatagcctgccaatcaaaaaaagcccaggacctgatggagtcatagccgaattctaccagatatacaaagaagagctggtaccatccctacaggaactattctaaaaaatttaggaggaagaggccgggcacggtgtggctcacgcctgtaatcccagcactttgggaggccgaggtggacagatcacaaggtcaagagatcaagaccattctggccaacatggtgaaaccccatctctgttaaaagtataaaaattagctgggcatggtggcagatgcctgtagtctcagctactcagggggctgaggcaggagaattgcttgaacccgggaagcggaggttgcagtgagctgagatcacaccattgcactccagcccgggcaacagagcaagacgccgtctcaaaaaaaaaaaaaaaaaaaaaaaaaaaaaaaaaaaaaaaaaaaaaatttaggaggaaggacttctccccaactcattctatgaggccatcatcagcttaataccaaaacctggcagagacacaacaaaaaaagaaaacttcaggccaatcaatatccttgatgaacattaatgcaaatattctcaacaaaatacctacaaaccaaatccagcagcaaatcaaaaagctaatccactatgatcaagtaggcttcaccctcaggatgcaaggttggttcaacatatgaaaatcaataaacgtgattcatcacatacagaactaaagacaaaaaccacatgattatctcaataaatgtagaaagacttttgataaaattcaacatcccttcatgttaaaaactctcaataaactaggtattgaaggaacaaagctcaaaatagtaagagccatctatgacaaacccacagacaacattagaccaaatgggcaaaagctggaagcattcccctcgaaaactggctcaagacaaggatgccctctctcaccacttttattcaacatagtattggaagtccaggccagagcaatcaggcaataaaaagaaataaagggcatccaaataggaagagaggaaatcaaactatctctgtttgcagattctatacctagaaaaccccatagtctcagaccaaacactccttcaactgataaacaacttcagcaaagttgcaggatacaaaatcattatacaaaaatcactagtattcctatacaccaacaacaaccaaactgagagccaaatcagaaaagcaatcccattcacaatagctgcaaaaataaaatatccaggaatacagctaaccagggatgtgaatggtctctacaatgagaattacaaaacactgctcaaagaaatcagagaagacacaagcaaatagaaaaacatctcatgctcatggataggaagaatcaatatcattaaaatggctatactacccaaagcaatttacagattcaatgctattcctatcaaactaccaatggcattcttcacataactagaaaaaaattttttttaatttatatggaaccaaaaaagagcccaaatagccaaggcaatcctaagcaaaaagaacaaagctggaggaatcacattactcgacttcaaaccatactatgaggctacggtgaccaaaacaacatggtgctggtacaaaaacaggcacatagaacaatggaacaaagtagacagcccagaaataaggccacacatctatgagcacctgatctttgacaaagctgaaaaaaagaagcaatggggaaaagacttcatattctataaatggtactgggataaccagctagccatatgcagaagattgaagctggaccccgtccttacaccatatacaaaaatcaactcaagaagtattaaagagttacatgtaaaactcaaaactataaataccctggaagacaatctaggcaataccatcctggacctaggaatgggcaaagatttcatgacaaagacaccaaaagcaattccaacaaaagcaaaaattgacaaatgggatctaattaaacttaagagcttctgcacagcaaaagaaactaccaacagagtaaatagacaacctaaagaatgggagaaaacatttgcaaactgtgcatctgacgaaggtctaatatccagcatctataaggaacttaaacaaatttacaagagaaaaacaaacaaccccattaaaacatgggcaaaggacatgaacagacacttttcaaaagaagacataaatgcaaccaaaaagcatataaaaaaagctcaatatcactgatcattagagaaatgcaaatcaaaaccatgagataccatctcacactagtcagaatggctattataagaaagtcaaaaaataacagatgctagctggcaaggttgtgtagaaaggggaaccctatacactgttggtgggagtgtaaattagttcaaccattgtggaaagcagtatggtgattcctcaaagaactaaaagcagaactaccatccaatccagcaatccctttactgggtgcctttacccagaggaatataaagcattctaccataaaaacacatgcatgcaaacgttcattgcacactgtttacaatagcaaagacttggaatcaacctaaaggcacatcaatgacagactggctaaagaaaatatggtacatatacatcatggagtattaagcatccacgaaagagaatgagatcatgtctttcatgggaacacggatggagctggaggctatcatccatagcaaactaacacaggaacagaaaaccaaatactacatgttctcacttataagtgggagctaaataataagaatttatgaacacaatgaaggaaacagcagacaatggggtctacctgagtggggagggtggcaggggggagaagagcagaaaagataactattgggtaccaagcttaatacctgaatgatgtaataatatatacaacaaaccctcatgacacgtgtttatctttgtaacaaacctttacatgtaccccaaacctaaaataaaagttaaaaagtaaaataacttaagcttaaaacaaaaagttaggggaccaggtgaaaatatgaataacaacaacaaaattaacatgaaatggatcataggcctaatcataaaagttaagcctataaaacttcagcacaaagcagaaaatctttgtgatttgggagtaaggacaggtttcttagcacacaaaaagcacaaccaaaaaggaaaaaaaaaattgtaaattagacatcatgaaaattaaaaacttctgctctttaaaaggtatcattatgaaaacaaacaagcagccagagagaaaggtcaggttacccacaaagaaaagcctatcagactcacagctgatctctcggcagaaactctacaagccagaagagagtgggggccaatattcaacattcttaaagaaaagaattttcaacccagaatttaatatccagccaaactaagcttcataagtgaaggagaaataaaatcctttccagacaaacaaatgctgagaggttttgtcacaaccaggcctgccctacaagagctcctgaaggaagcactaaacacggaaaggaacaaccggtaccagccactgcaaaaacatgccaaattgtaaagaccatcaaggctacgaagaaacagcatcaactaacgagcaaaataaccagctcacatcataatgacaggatcaaattcacacataacaatattaaccttaaatgtaaacgggataaatgctccaattaaaagacaccggactggcaaattggataaagagtcaagacccatcggtgtgccgtattcaggaaacccatttcacgtgcagagacacacataggctcaaaataaagggacggaggaagatctaccaagcaaatggaaaagaaaaaaaggcaggggttgcaatcctagtctctgataaagcagactttaaacgaacaaagatcaaaagagacaaagaaggccattacataatggtaaagagagaaattcaacaaaaagagctaactatcctaaatatatatgcacccaatacaggagcacccagattcataaagcaagtccttacagacctacaaagagacttagactcccacacaaaaataatgggagactttaacaccccactgtcaacattagacagatccacgagacagaaagttaacaaggatatccaggaattgaactcagctctgcaccaagtcgacctaacagacctctacagaactctccaccccaaatcaacagaatacacattattctcagcaccacaccacacctattccaaaactgaccacatagttggaagtaaaacactcctcagcaaatgtaaaagaatagaaattacaacaaactgtctctcagaccacagtgcaatcaaactagaactcaggattaagaaaatcactcaaaaccgctcaactacatggaaaccaaacaacctgctcctgaatgactactgagtacataatgaaatgaaggcagaaataaagatgttctttgaaaccaacaagaacaaagacacaacataccagaatctctgggacacatttaaagcagtgtgtagagggaaatttatagcactaaatgcccaaaagagaaagcaggaaagatctaaaattcacatcctaacatcacgattaaaagaactagagaagcaagagcaaacacatccaaaagctagcagaaggcaagaaataaccaagatcagagcagaactaaaggagatagagacacaaaaaaaccttcaaaaaatcaatgaatccaggagctggctttttgaaaagatcaacagaatggatagaccgctagcaagactaataaagaagaaaagagagaagaatcaaatagacacaataaaaaatgataaaggggagatcaccactgatcccacagaaatacaaactgccatcagagaatactataaacacctctatgcaaataaactaggaaatctagaagaaatggataaattcctcgacacatacaccctcccaagactaaaccaggaagaagttgaatctctgaatagaccaataacaggctctgaaattgaggcaataattaatagcttaccaaccaaaaaaactccaggaccagatggattcacagccgaattctaccagaggtacaaggaggagctggtaccattccttctgaaactattccaatcaatagaaaaagagggaatcctccctaactcattttgtgaggccagcatcatcctgataccaaagcctggcagagacacaacaaaaaaagagaattttagaccaatatccctgatgaacatcgatgcaaaaatcctcaataaaatattggcaaactgaatccagcagcacatcaaaaagcttatccaccatgatcaagtgggcttcatccctgggatgcaaggctggttcaacatatgcaaatcaataaacgtaatccagcatataaacagaaccaaagacaaaaaccacatgattatctcaatagatgcagaaaaggccttagacaaaattcaacagcacttcatgctaaaaactctcaataaattaggtattgatgggatgtatctcaaaataataagagctatctatgacaaacccacagccaatatcatactgaatgggcaaaaactggaagcattccctttgaaaactggaacaagacagggatgccctctctcaccactcctattcaacatagcgttggaagttctggccggggcaatcaggcaggagaaagaaataaagggtattcaattaggaaaagaggaagtcaaattgtccctgtttgcagatgacataattgtatatctagaaaaccccatcgtctcagatcaaaatctcctttagctgataagcaacttcagcaaagtctcaggatacaaaatcaatgtgcaaaaatcacaagcattcttatacaccaataacagacaaacacagagccaaatcatgagtgaactcccattcacaactgcttcaaagagaataaaatacctaggaatctaacttacaagggatgtgaaggacctcttcaaagagaactacaaaccactgctcagcaaaataaaagaggatacaaataaatggaagaacattccatgctcatggataggaagaatcaatatcatgaaaatggccatactgcccaaggtaatttatagatccaatgccatccccatcaagctaccaatgactttcttcacagaattggaaaaaactactttaaagttcatatggaaccaaaaaagagcccacattgccaagtcaatcctaagccaaaagaacaaagctggaggcatcatgctacctgacttcaaactatactacaaggctacagtaaccaaaacagcatggtactggtaccaaaacagagatacagaccaatggtgctgggaaaactggctagccatatgtagaaagctgaaactggatcccttccttacaccttatacaaaaattaattcaagatggattaaagacttaaatgttagacctaaaaccataaaaaccctagaagaaaacctaggcaataccattcaggacataggcataggcaaggacttcatgtctaaaacaccaaaagtaacggcaacaaaagccaaaattgacaaatgggatctaattaaactaaagagcttctgcacagcaaaagaaactaccatcagagtgagcaggcaacctacaaaatgggagaacatttttgcaatctacttatctgacaaagggctaatatctagaatctacaaagaactcaaacaaatttacaagaaaaaaacaaacaaccccatcaaaaagtgggcaaaggatatgaacagacatttctcaaaagaagacatttatgcagccaaaggacacatgaaaaaatgctcatcatcactggccatcagagaaatgcaaatcaaaaccacagtgagataccatctaacaccagttagaatggcaatcattaaaaagtcaggaaacaacaggtgctggagaggatgtggagaaataggaacacttttacactgttggtgggactgttaactagttcaaccattgtggaagacagtgtggcaattcctcggggatctagaactagaaataccatttgacccagccatcccattactgggtatataaccaaaggaatataaatcatgctgctataaagacacatgcacatatatgtttattgtggcactattcacaatagaaaagacttgcaaccaacccaaatatccaacaatgatagactggattaagaaaatgtggcacatatacaccatggaatactatgcagccataaaaaaggatgagttcatgtcctttgtagggacatggatgaagctggaaaccatcattctcagcaaactatcacaatgccaaaaaaccaaacatcacatgttctcactcataggtgggaattgagcaatgagaacacttggacacagggcagggaacatcacacactggggcctgttgtgtggtggggggaaaggggagagatagcattaggagatatacctaatgtaaatgatgagttaatgggtgcagcacagcaacatggtacatgtatacatatgtaacaaacctgcacattgtgcacatgtaccctagaacttaatgtataataaaaatatgtatatatatatatagaaaacaaacaagcaagctgcagataggaagataatatacacaatacttacagctcatgaaggacttctatccagtagaaaggaaaactcttacaactcaataagaagatgacttaaatcaaaaatgggcaaaatatttgaaaagttactttccaaaaaagagaaatgtcagataagcctatgaaaagatgctcaacattattagggaaatgcatattaaaaccacaatgaaatactactacatatccactaaagtgtctaaaatttaaaagactgacaatatcaatcattgacaaggatatggagaaactgaaattaatttaatacattgctagcagaaatcccaaatggtacagataatttggaaaagtttggcagtttcctttaaagttgtgcataaactggtcataagactcagcaattccatccctaggtatttacataagagaaatgaacacatatgtccacacatagaattgtgatttatatatatagcagctttattcataatagatcaaaacttgaaacaacctaaatgtccatcaataggtgaacagctaaacaaattgtggtatatctatatactagaatactattcagcaataaaaaggaacttattattgatacacatgataacatggatgaatctcaacatggatgggtttcaaaagcatcatgttaagcaaaaaaaaagtcagacacaaaaagagtgcatattatatggcctatttatttcaaactctagaattctgaagtcaaatctaacgtatagccacagaaagcagaaaagtagttgactagggatggctgttcaggtggaggggaaccaactgcaaaagggctttagagaactttttgggtgatggacacacactatatcaggatggtagtggtggtgaagtgggtgtttacatttgtcaaaactctcccaactataacgttaaaatacttgcattttattatttctaagttatactcatttaagaaagttaatagaggtgaacagaggatatcctaattcatttcacattcttcccttccaattcaatctagagtcaacaatgtggtctgtcacaattccaactcagcagaccttttaaatatcctgaacaaatgtttacctgttgccttgtaattaacactactcaatttcaatagaatttccattatttaaaaaaaacctctaaaattaggaaagaattcccacatgtggtttttaatatatctcatgcttacttcgaaatataatctgcactagtctttgttaaagtttgagggagtcataaaataatgtccctctcctctcctgacctctgaaccacttgagacacagacagatggagattcaatattttaagtttactgctgaaaaaggctaggttagaggatgtactttaagtttatgccaacaatagccaccagatattgaacttagaattagacagacctgcttactaaggcatgggcagttctgcacaagcacaaatctccctttgcagaggcaaagaactttcactgcaaggttcacaatgtagctggcaagagaccacaacatcggttctctgcagttatgacaaatccacaaaagggaaaaaagaggctagcatgcccagttctatatcttaaactccctcctttcctggtgaagtgagagaaagagattagaattccttggtaaatggatagcctaagaagcactgtgagaggaagccatccttacccgccgctgccttctgaccaaagtagttcatatatagtgcacattagggcatgattcatgttacagtagctttagggccacacttcttcttccgaagtaaccatatttaattgcaagtgactaaggtaaatgactttagggataacctcctttatttcattttatttctgttttataatttatatatttcaatatcttattattggtaagaaaaacttaactttctcagtcctaaaattctttattatcaaatacatcagtttaataataatctctaaggaagaaaaaaacacatttaagatatccattgatttgaagataattattatggaactatggttcttatgtcaactcacaactcatttagatattaatacatgtatcatgaaatcatagctcagaattgctggtccagagtcactttagaatggctctgattcaaggaaattaaaagaaatgattgttaattttcttagtgctgggaaaggcagtgaaacaagcttttgaatcattatgtaattttcaaacaactaaaagggctatactgttcagttataatcttaaaaattctagctgagacagagcttttaaaaaatctttatagttttaccatacggcatcaattcaaaagattgtcatactgaaaccactgccataaaattttgtatgtaggccccagttgcagtagatctggctcctgtgagctataacttgcatggcttttcaatgtttatgtagtgtctgttaatatatttaagataaatactctataaccaaacagcctgttttctagagaatgatatatgattcttgtgttatcaggcatggtctggatgtctagacactctgactaatgagtgtctatgccatacaattctcaaacaagaataatgtaaattatagtcaatataacttgaacagtaaacagtgttatttcagaaagtatattaaacatctatatcattatcatgaacatcaattctcttcagattcataaagatttgttattaaaattaacaagcttagtctatgtttgtatatcagtattcacatccttgtaaaataatgggtgcatttttctcttcacgcatagaagagtatgagctaaaataagcattttgaggggcctgcagaaatgagctgccttccttctccataacttactgtttctttttctcctctgtcttatgtctaaactattttatgtcttatatctgggtaagaaagagactaacttggcctaccatgccagtacagaggaaacactaggttcttataacagggcctagtggccacatgcattccatcctgagtcttgcctctttgggacttgagctatagaccctgtcaagaaaaatcccactatctctcctataatactggaatcagagacttcttactttcagataaggaaaggattacaaaaaaagttctccttttttaaaatcagaggaaattgaggttaaatatctccaaactaactcaagttcttcatagaaatagctagcatttactgaaatagctggcattacttcatgtgtgaggcaccatgcaaggtactttaaatatattaagttcatataagaaagacactaagtagatcaatctaatttttcaaaagctaacaacataaaataataggaaaatcttcaaaatgcagaaaaaaactatttattcacaaattacacaaaaaacaaacatccattactcaaaacaatataccaaatgttgagtactcacttctctagatacctatttacgttttgagaatgttctttattaaacaaaataaaataattaacatattttttggagcactctgaaactaacctctctaaccagagctaattttctgatgatataacttaaggaaagaatattcttttcaaggcaagtgctaatttctccaaccctgaaaagagatatgcattccaataaaacaaaagttttaaaaaccatcttcataaaaaatgtagatcattacttataagctccaacagtagtaagatctttaacataaagtgggctactttcatctctaacaaagataaaattaatacaccaatagtatcttcctgagtgtcagaagtaacagaacccaacagttctatattattgtactacaatatatagtataaaaataatagttcagattagcaatgacagtattggtttgtgaatatgactgtggactttcaataaaattttttttaatatagccttttcatactcatgagattgtactataaatcacattccaatttctatgtattttgtgcttaagttatttattcattggcactctaataacagccctacttttttatttttagaaagatataattagctatttaaaattgtaattatttttcatttcactgagtagtttcaaaaaaagttatctagaaaagtaattcccagtcatcaaatggaaagacacaagcaagaagtaagttgtttccagggtttttaaagctttgtaaaataaagaaaagaaagtattggttttgactgggataatatagcagtacaattgtcattaacctatctgtaaaagccattcatttaaaaatgcatattttaaaaatgactcatttgtggtaaggattacttactgtaacaattaaaaaataaaaccatcattctcatatttatcaatactttacacttttaccaaatactgaaggagacaactatcattgttacaacttcaaagtcaaaacagaaacacaaatcagaattaagagaaacttcagaaaatgttcagaatgtacacatttgtgtgcattttcagccaaactttcaaagattccacatataaccaaatgacaactttgaatcaaaatgaatgtcaaaaatattcaagctttctgacagacttactctaatgaagcaagaaaaagacagcaaatattaagcgcagtatatttctcagagggagggaaatcacacacttcctttatcataaaacaaaagttgagacagcatttcagtaacattgatcaaattattcactattcaagaatacatttttcaagttttgtctttaaaatgtattcatttacatattcagattaaactaagtttattaatcaaagaccattttactcagaattttaaccttgagaaatataaatcataacttatcaaagcatattccaaacactatacaataatcctgccattttagtttttatatgcctcatctgaaaaacatattttacaaccaggcgttctcctatctatctccagagtaaatgtctctatgtcaaaacttcaagaggcaatcaaaaagacagattcaaataatcctatgcatactgcttcatcgggctttgataaaaacagagccatctggtggtgtagcaccatcctccttttcagttacagtctctatggccccagaagcagacacaataaccattgttttatttgctgaaactgtcttctctttctcagcaatagctgcacaaacagcaacaatctcatcactttcaaagtcatagtctggaattgactttggtgaaaagtgtgttacttcagctggtgcttcactttttttaatcctctgtgctaccttctgctgctcctggagcgttcttgcccaagagaggtcttctttccatatttcagggttcattggatagatgtgaagggctacttgaaaacttcgaattgcctagaaaataaggtcagagttttttgttttggttttaaaaattagtatgtttaatacaatcctgtgtgtttacgtacatatatactgtacacatacacatcctaatgcattatcttaatgtactagaacacaaaagatggaagctacggtgttgccctaaacactggggaaaaaaattatagaagtgtgaaagaaagtgactgacaatatgcttatggactaaaagccattaaaatgggagtactcataatagggctaaagataaagcaaatatattctcagcttcagtagaccagtaagtatgtacatttggggatttcctgggctaacccacaatcacaaaggtaccaggagtggatatctttgaagttaacagtttagatcctaacaatgttaacatttattgactgtttactacattctaggcactaaagatttacatgtatttggctgggcacggtggctcatacctgtaatcccagcactttgggaggctgaggtgggcggatcacctgaggtcaggagttcaagaccagcctggccaacacagtgaaaccctgtctctactaaaaatacaaaaattagccaggcatgatggcgggtgcctgtaatcccagctacccaggagggtgaggcaggagaatcgcttgaacccgggagacagaggttgcagtgagttgagatcacgccattgcactccagcctgggcaaaaagagcaaaactccatctcaaaaaaaaaaaaaaaaaagatttacatgtattaactcatctatcctcacaataatcatatgaagtaggtatggttattgttttcagtactattttagagaagcacagaaagagtagaaaccaaaggtatcagctgggaattggcagagctgggatgcaaattcaggcagtctggcttcagagtccattctcttattcattatattatactgcttagtcacaagaactccactacagtctggataaaggtcaacctcagcactactgacatatttggctgagtaattctttattttggaagggctgtcctctataatgtagaatattcagcaacatccctgacctacactcactaaatccaatacagcttcctttcctagttgtgataaacaaaaatgtctctagacatggcaaatgttctctgggggtaaaactgccctccaagtgagaatcattggtctaaatctattatatgttgttttctctgagtatacttagtctctggatagaagattctcatgcaaacagattagttttaagattgcacttaatcggccaggcaccatggctcacgcctgtaatcccagcactctgggaggtcaaggcaggcggatcacctgaggtcagaagttcaagaccagcctggccatggtgaaaacccgtctctactaaaaatacaaaaaattagccaggtgtggtggtgcacgcctgtaatcccagctactcgtgaggctgaggcaggagaatcgcttgaactcgggaggcggaggttgcagtgagccaagatcgcacaattatgctccagcctgggcaacaagagcgaaactccgtctcaaaaaaaaaaaagattgcacataatctacagatttacaatctaataggccctttagagaagtcataaagaagacagatacatgatggctcacgcctgtaaatccaactctttgggaggccgaggcgaaagcatggatcactcaagaccaggagttcaatgacaaaaccccgtctctactaaagatacaaaaaaaattagttggacatagtggtggtgcctgtaatcccagctacttaggaggctgaggcaggaaaattgtttgaaccccggaggcagaggttacagtgagccaagatggtgccactgcactccagcctggatgagagagcaagactctgtctcaaaaaaaataaataaataaaaaatacacagagataggtatataaagcagtatttggccaggcgtggtggctcacgcctgtaatcccatcactctggcaggcggaggtgggcagatcacaaggtcaggagttcaagaccagcctggccaaaatggtgaaaccctgtctctactaaaaatacaaaaattagctgggcatggtggcaccctccacgtggtggctactcagggggctgaggcatgagaatcgcttgaacccaggaggcagaggttgcagtgagccgagattgcaccaccgcacttcagcctgggcgacagagcaagattccgtctcgaaaaaaaaaaaaattagctgggtgtagtggtgtatgcctgtaatcccagctaatttggaggctgaggcaggagaatcacttgaacccaagaagcagaggttgcagtgagccaagatggtaccactgcactccagcctgagcaacagagcgagactgtctcaaaataaataaataaataaaaattaaaaattaaggtaccatgggaattgtgctttatgtgttcttaatattctaataaaaatccacctatatagaagtgttaaaaaataaatacctcttcatggcataaagctaatgccttaggaaacattaaaaggtattttattcatatttactaaaattttaaaacagcaataaagctcacccatttaaaacatacaattcaatattcacagtcacacagccatcacccataatcaattctagaacatttttatcacccccaaagaaaattccatacctactggcagttactcctcatttctccccaaaaccccagctctaggcaagcattaatttacttgctattgctatatatctgtctattctgtatatttcatataaatgaaatcatacagccttttatgtctggtttctttcacttaacatattgtttttaaagttcatccgtgttgtaacaggcatcatttctttttaatgctgaataatatttcattgtatggatataccacattttgtttatctatttgtcagttgatggcatttgagttgtttccacttcttggccattttaaatgctgctgctatgaaggtttatgtaaatgtttttgtgtggacatatgtcttcatttctcttgggtataaagagtggaactgttttgtcatatgataactatatgtttcatttttttgaggagctgccagactgttttccaaaatggctataacattttacattcccaccagcaatggacgaggactccaatttctccacaccctcaccaacacttcatattgtccatcttttttatgatagtgaatgtgaagtagtatctcaatgtggttttgattttcatttccttgacaagtaacaatgttgagcatctttcatgtgctcattagctgtgtgtgtatcttctttggaaaaataccttttcaaatcctttgtctatttttaaattacattatttgtctttttgttattgagttgtaagagttttttacagagtctacatactagacctttatcagatatatgatttacaaatattttcttccattctgtgaattgccttttcactttcttgacagtaacttttgaagcacaaaagtgtttaatttgaagtccaatttttatctacttttttcttttgttgtttgtgcttccaatgtcatatctaaaaaatattaatatattgctgagtccaaggttacaaagatttacacctatgttctctcctaagagttttataatacttttagttcttatgtttaggtctttgtttgtttttgagttaatttttacataaaatgtgaagtaagagtccaaagtcattcatttgcatgtggatatccaactgcctcagcaccatttgctgaagactattccttcccccattaaattgtcttgacacccttgtccaattaactgtaaaaatgtaggtttatttctgtactttcagttctatcccactgatctatatgtctacattatgcctatctaagtactatactgtcttgattactaatgctttcatatttactaaacttaaatatacatatgtatttaaagtaaatccaaagagctgcaattacattttcaaatttaagatagtttaaaatctcccaagggcactcctcttcaaagaacttcacaaaacaaaatggcagaggagtagcatcagcaagatggcagagtgggaagccctggaccctccttcatccaacaaatacaccaattcagcaacaattcacaaacaaaattcctttgtgagaaatccagaaactaactgaaaggctcctgcaccctggatgaataagaatacacactcatcaaagccagaagggagattcaggacaccctctcaccagaatcctactcccagcacagctccacaggattgggaagaaccctgcagctccaagctaccctcaagggaaagaatgaattggtctgagtgtccaatgccccaacttctacggtggctacaaaaagtactggtttctgtcttgcctgttttttggaccactgttaaaacaagtcctacataatctaaccacctacaggagaccagagataacggaggtttggaagagtagtcaccctatctgttcccccagcttggcatacagtgagcgaagaaaattcccagctcccagattttgcctagggaagaaaagaattggtccacactgtgtccaatgccccagtttttatggggactaccaaaaggactggcttctgtcttacctgtagtggagtactgatggaatttggcaaaatccagctgcctgggggctaggaagaacagagagggatatttgggctggaagttgctatcaccccttccctgagctgggcacaaagtaaatggacaaaatcaattttagaagtaagaacaaaactaggggcatcatactcatgaatttcaaaatatattacaaagtgacagcaaacaaaacaatacgattctggcataaagtcagatatatagaccaatggaacagaatagacagcctacaaataaatccacacccaacatggtcagctgatcttcaacaagggcattaagtatacataatgagaaaagtctagtttcttcaacaaatgatgctgggaaaaccggatatccgcgtgcaaaagaatgaaaatggatcctcatcttacaccataaacaaaagtcaactccaagtgcattaaagacttaaatgtaagacctgaagcttacattgtaggagtcttatgactcctacaaaaaaaacaaaaacaaaacaaaacaaaacaaaaaaacagggaaaaccttcatgacattggtcttaaaaatgatttcctgaatataacaccaaaaacataggcaacaaaatcaaaaataggcaagtgagattacatcaaattaaaaggcttctgcacaacaaaggaaacaaccaccagagtaaaaggaaacctatggaatgggagaaaatatttgcaaatcatatctaaggttttaactttcaaatatataagaaataactcaatagccaaaaaacctagtaacctgatcttaaaatgggctaaacacttgaatagacatttctctaaatggctaacaggtatatgaaaagatgctcaatatcactaatcagggaaatgcaaatcaaaaccaccatgaaatatcacctcatgagtcccagctactcgggaggtgaggcaggagaaccgcttaaacccgggaggcggaggttgcagtgagccgagatcgcaccatgtcactccagcctgggtgacagagggagactctgtctcaactcgctcactcagtgctcaatgttgcccaggcgtgatctcggctcgctgcaacctccacctcccagccgcctgccttggcctcccaaagtgccgagattgcatcctctgcccggccgccaccccgtctaggaagtgaggagcgtctctgcctggccgcccatcgtctgggatgtgaggagcccctctgcccggccgcccagtctgggaagtgaggagcgcctcttcccggccgtcatccagtctaggaagtgaggagcctctctgcctggcggcccatcgtctgggatgtggggagcgcctctgccccacctccccgtctggaatgtgaggagcgcctctgcctggccgcgaccccgtctgggaactgaggagcgtctctgaccggccgccccgtctgagaagtgaggagcccctccgcccagcagctgccccgtctgggaagtgaggcgtgtctccgccccacagccgcccagtctgggaagtgaggagcgtctccgcccggccagcgccccgtccgggaggtggcggggcagcccctgcccggccagacgccccgtcccggaggtggcggggcagcccccgcccagccagccgcccatccgggaggtggggggcgcagcccccacccggccagctgccccgtccgggaggtggggggcgcctccgcccggctgccccatctgggaagtgaggagcccctctgcccagccgccaccccatctgggaggtgtacccaacagctcattgagagcgggccatgatgacgatggcggttttgtcaaatagaaaagggggaaatgtggggaaaaggagagatcggattgttactgtgtctgggtagaaagaagtagacatgggagactccattttgttctgtactaagaaaaattcttctgccttgggatgctgttaatctataaccttacccccaaccccgtgctctctgaaacatgtgctgtgtccactcagggttaaatggattaagggcggtgcaagatgtgctttgttaaacagatgcttgaaggcagcatgctccttaagagtcatcaccactccctaatctcaagtacccagggacacaaacactgtggaaggccgcagggtcctctgcctaggaaaaccagagaactttgttcacatgtttatctgctgaccttccctccactattgtcctatgaccctgccaaatccccttctccgagaaacacccaagaatgatcaataaatactaaaaaaatttaaaaaaatttcaattaaaaacctcaaagcataggtttaacaattaaataaaagctaactcaaattaaaaaaaaaaaaaaaagaaatatcacctcacatctgttaaaatgggtattatcacacacacaaaaaaggtggccagatgcggtgactcacacctataatcccagcactgtgggaggccatggtgggcggatcacctgagaccaggagttcaagaccagcctggccaacatggcaaaaccctgtctctactaaaaatacaaaaattagccaggcgtggtgatgggcacctgtaatcccagctacttgggaggctgaggcaggagaatcactcgaacccgggaggcagaggttacagtgagccgagatcacaccactgcactccagcctgggcgacagagcaagattccctctcaaaaaaaaacaaacaaacaaaaaggcaagatgtgtcagtgaggttatggagaaactggaacccttgtatattgttagtaaaaatgcaaaatggtgtagccattatggagtttcttcaaaaaattaaaattagaactaccatgtaataaagctatctcatttctggatatttatccaaaagaatcaagatctcaaagagatattagcactcccaggttcatggcagcactattcacgatagccaatatgtagaaacaacctaaatgtccatcaaaggaagaatgaacaaagcaaatggtatacacacaaaatgaaatatttttcagcttcaaaaaagaagcaaattctacaatacacaacatggatgggactttgaggacattatgctaagtgaaagaagccagtcacagaaagcaaattctgcataattccacttatacgatatctctaaaacaggcaaattcatagactcaaaaagtaaaattgtgaggcaaggcacagtggctcacgcctgtaatcccggaacattgggaggctgaggcaggaggatcatgaggtcaggagttcaagaccagcctggccaacacggtgaaaccctgtctctactaaaattacaaaaattagccagacatggtggcacacgcctatagtcccagctacttgggaggctgaggaacgagaatggcttgaacccgggaggtggaggttgaagtgagccgagatcacaccagtgcactccagcctggggaacagagcgagactccatctcaaaaaaacaaaaaacaaacaaacaaaaaaaaacagaacaataataaagctcataaacaaactttatttttcaagaaaaaaactcaattcttaagtgtcaacatacaacatttataaagactataattcaagaatttgtactattcaattataaaaaagataatgcagcttgactcaaacaatgtctacagtaattaactaaactaaaaatttacaagtggatttttttttttttttttgagatggagtctcactctgtcactcatgctggagtgcagtggtgcgatctcagctcactgcaacctccacctgccaggttcaagatattctcctgcctcctgagtagctggaactacaggcacacaccaccatgcctggctaatttttgtatttttagtagagacgacgtttcaccatgttggccaggctggtctcaaaactcctgacctcaggtgatcaacccacctcagcctcccaacatgctgggattacaggcatgagccaccatgcccagccaaattttttttttttttttttgtaaatataggatcttgccatgctacccaggttggtccaaactcctggcctcaagcaatccttctgcctcagcctcccaaagtgctgagattatacgcgtgagccaggatgcccagcccctcaagtgaaattttaaaaactctcaatcatcttccttttgtctggaaattatcacttgtccatcccattactaccattacaaaagcgaaacaataaaaagaatcaaatgatgcaactgaaatttctaattaaagatttgctcatgcaaaatattaaaaccaatggctaaaatgagacttggaaaacagagaaaacattagtaaacaaaattagtatttattgcacattggcatgaagaaaagcaaaagctggcaatgaattacacagagcccgaagaagggaagccacaaagctagttccagcactgaaggctgagaaccctggaaagccaacagaagaatccttcctgatactgttacctcctggtattcattacctttcccagtctccttccctctctaccttcttcttcaggataaatcccttatgtattcctttctcaccatccccattccctcatacagaatttttaactcccagaaccattctcttcagcttttttttttttttttttttgagacaggtcttgctctgtcacccaggctggagtgcagtggcgcgatctcagctcactgcaagctccgcctcccaggttcacgccattctcctgcctcagcctcccgagcagctgggactacaggcgcccgccaccacgtccagctaattttttgtatttttagtagagacggggtttcaccgtgttagccaggatggtctcaatctcctgaccttgtgatccgcccgcctcggcctcccaaagtgctgggattacagacttgagccaccgcgcctggcttcagctttcttattctctcatccttccacttcttaaaatctcattctcataaagtcttttatatatatatatatatacacacacacacacgtatatatatataaaatgtataccatatacatacatattttatatatatatatctcctataaacattttccaatgttcacatccaactcttacaaagtttaaataattattcatggagatatacccaactactgacttttaatttactgcctgtgctatttacatacataatttcctatggttttagtccatatgtatatatagtaagaattgttagatattagaaattctagcttgctttcaatatattttacatagtgtcccttcgttatgacattttgagtcatcttttttttttaccattctagtcttttaagagaacagcttaaatctacataaaaacagagaagattcctaaaaattacatttaaatggcaaaaaaaaaatactttcaattcttctaagaatttcacagtattaatgaatagagccatatcaacagaaaaaaaaaaagtcgaactggtactcttattcaaaaaaatttaaatattaaattatttttattggatgattcaaagtatctccgtctcacctgcagtgtattttctttctttataaaggacaatctttactaaatattatgtcctagagatttgttccattaccatagacactattggcaaaagagatagtgatgtataaatttttaataagggaggcaaggaaaaagtattatatgatagggttttcttcccctgttaatgttagaaaactaaattctttgaactcttttttccaactctggtatgatttaagtcttcatgtaaaaagagagaagttgacagtgctaaatggcaagaaaaaaacagtacttggttaaaatggtttctatcactgtgaatctcatttagattatcattaacttactttaatcaaatcaattattttctcatacaaattccttactatttctgagaatttgacaaacaccttttttggtaagtagaaataatgatacatttataagaatgccagaaaaaaagctcagtcatccacaatttactaaaaccactgttagtaagtttatattttgaatttatcagtaattttagtcttgcaagaaacttttaaaatgttttattttgaactgtaaaaaataaaaccatttttaaaatcttaatttacttaataacaaggaggaaatttggcactgtatattagatttgcaaacacttgttaggaagttaaatttcgttagctatcaggtgtatatagccctgccaaaagaaaaacaacaggacagctgtcacagctaattcttacctagatagcctctgctactaacaaggtatagtccagacaaattgagagatgcattaggtaccagtttacggtaaacattacacaatgagtatttcatttgcacacatttctactcttcctctttatcccctcaataagcctaacaacttttcagtctaaatgttcatcaccattaccctcccatattctactgtcttccttcccctgtataatctatcagcggttttgtctccacagtgatactaataccactttataatgtggtaaatgtaatgatccaaagaactaagccaaaaagttgcctattgtctatttaaataaggtttaccaaatgccaatgttttatgttaaattttttttaatatccatgatgtcaagtaactgaaaaatattctgatcatgatataattagtgtctataataaaaaagatgttcagtaatacctgtgaactgtgtttatggattaatacctttaagaagtaatttgctaattgttttttgtatagacttgataaacggctattcacttttgggttcagttaatcaaaaatatgtcaaaatagactgggcatgttggctcacgcctgtaatcccagcactttgggaggccgaggctggagaatcatttgaggtcaaaagttaaagaccagcctgactaacatggtgacaccccgtctctactaaaaatacaaaaacattagccaggcatggtggcgcatgcctatagtcccagctacacaggaggctgagacaggagaatcgcttgaacccaggaggcggaggttgccgtgagctgagattgcaccactgcactgtaccctgggtgacatcaagactccatctcaaaaaaaaaaaaaagtcaaaatatacttaaaatttctgcattataataatctgacttcctcaccaggattatctctcctaaaccaagttgagcacgtcccaaagtctgccaagactcccatgaatgtggattttgctggacggccatttctgctgcatgtactgctgggaacatttcatgaagagacattagcacctataggcaaaaaaagaccaaaaaatctgtcagtaatattcataaactagcaactacataaaaaacccttttcattttttaagatatatttttagtccagtaaaaatagcatttcggtgatttttaccccttactctgccattcagggtaagaaattatagttctcttttcaccccttatataactatgaaaatgtaaacgattccctttccagttattgaatcttatgtccatctggtcaaaaccaagtggtcatatcctaactatggtggctcagaggtattttgaactcccaattccacttccatttattctatttacaatgtggttttcagggaaccccaggtattgccattaaactaggtgaattaatttgttcaaccagccatcccgtccctaatgaacatctttatgttataaaaagtatttaaaacattccctaggccttctcactactgggcatttcaaaccatacatactaggaaggtagggttagggttagggttagggttagggagagttagggttaccagagagttctagtaccctccactgtggtctgtgggaagaggctggattttatctataatctttaggaccattaacactttaaaagatttgtgatacaaacattattatcaggttccaaattaaacaagtcttcataaagcttgccacaaacctgtcattcatatatacatatttaagattgaaaaaggaatacaaatgaaggtcctcatatcacttgattcagatgacataatttatttgggtttttcctggataaactaaagtcaaaggtgacaaatgtgtgtcctatatttgagatcacgatttgaaaaatatttgttaggtgtgcagattaaggctgaattgcaacaattccctgccaaaaatatgtttaatgctctgtgtgagacttttaaaatcacttggataacctattcaagtgctcaaaggttttctttacagactttcctacaaaatattagaaacatgtttttaaagtacaaatgttatttttaagctattaataaaattgcatctatgctgaccttttgctaaggactaagccatttttagaaatatctcatctagaacccaatccatcctcatttttaagaaaactgaactattttgctaagtctactatatttaatcacaaggaaagcgtatgtttttcatctaagagctcaacagtgactttttatttattttttatttacttatttatttttttgagatggagtctcgctgtgtcacccaggctggagtgcagtggcactatctcagctcactgcaacctccgcctcccacgttcaagtggtcctcctgcctcagcctctcaagtagctgggactacaggcatgtgccaccacgcccagctaatatttgtatttttagtagaggcaaggtttcaccatgttggtcagggtggtctcgaacttctgacctcaagtgatccacccacctcggcctcccaaattgctgggattacagacgtgagccatggcacctgcccaccagtgactttaaaagatagccaccgattcctatcttacaatagttaggctaaaataacagttaacttcattgtaaaggcaaatgaatttccagttttatgcataagacagaaccataaataatggtgaaatattttttcccaaagaaaccgtatttgtaaaagaaaatgggagaaaatgctattttgcttcatcattgctcactcaccgaacaaacatagcacaatttcataaggaaagtgaaattcttcataattattacctgtgatttcatctcgtatagggtagcatcatttggagttaactgtagtgcttcatcccacttctgaattgcctcccgatatctgtggttgttaaagttatatcaatgccatattttcaatatgcttttttggactttcaaaaaaaaatttttattgtagtaaaatataaaatttaccatcttaaccatttaagtgtacagttcagaggcattaagtagcattaagtacatatagttcattcacctttgtgtgcaaccaccaccaccattcatctccagaactttttcatcttcccaaactgaaactccatacccattaaacaataactcctcattgccccctcctccacccccgggcaaacaccattctactcttagactgctttcaggaggagcagtcatgtactttcagttcaacagttttttggactactttctagtccatgaaatatatgtaaaaatccaaaataaaggattagcaaattaagtccagcaacttactaaagtacaaaatccacatgatcatgtagtgtatgctcagaaaaacttagaaatgggttcatatgtaacagataagggagaaaaaagtacatgccactaaacaatacttagtataatttaacacccatttctgattatttataataataataaaagtatatacaacattaaataaatttagtactgtggtgccatcatctactaagctttaatgatataacctctaaaagcagtaactatatcacctaaaaagaaagtacttgcacttctttaggcatattgtgggtgatttcaagcctctctaaacaatatttccaaatgttattgtagatgtgacaggaaaaactttggaaattaatttattgatgtattccttcataacaatccttccactcacaattttctaacaaaggtagcagtaataaattctgcaagacttaatagtagcaaatgtctttcctccagcattagaaggaaaaggttggactgtttgtccaatcttttttctaccactccctacacatacctgtgctccactcagcagggtttttatagtccctacccacatatcatgcctttgttagtatggatcccctgctacacatacacacacacacatctgtattagttcactctcacgctgcaataaagaactgcccaagactaggaaatttataaaggaaagaggtttaattgactcagtaccacagggctggggaggcctcaggaaacttacaaggatggcagaaggggaagcaaacacatccttcttcacatggaggcacgagagagaaatgagcgctgagcaaacagggaagccccttataaatccataagatctcgtgagaactcagtgtcatgagaccagcatggcagaaactgccgccataattcaattatctccacctggtcccatccttgacacggggattattacaattcaaggtgagatttgggtggggacacagagccaaaccatatcacatatctaagattgccttcctactcctcttcatctattcaaaggctcctcctctaagaccaagttaaaatgctccgttcttcatgaagacctcctccagtggctctagcccactaactatgagtaccacttcagaccacatagcaacacttatatttccaaagcattttatgttttacaaagcactttcaatacaattatttaacatacaattattttcccaaaaagttaattcacttactactcaaagtaagtgaatataaatttggtgttatttgcttttttaaaaattattttgagagacagagtcttgctccgttgcactggcatgatcacagctcattgcagccttgaactcttgggctcaagggcctcccacctcagcctactgagtagctaggactacaggcatatgccactatggccagctaatttttttatttttttatttttgtagagacagggtctcactatgttgctcaggctggtctcaaacttctggcctcaagcaatcctcctgccttggcctccacaagtgctgagattacaggggtgagccaccatgcctagcctcaagtttggcattacttgttctcactttattgatgaggaaccaatggttgagagcagctaaaggactgtccaagtcctgcaaaagacaggatttaaagctagctcttaaaaatacaagaccaatactttctgtaactatatcaagtatgcctcccatttagttctgctctaattcctccttgtatttttgtcttctcttctctaatgagttcaggaaccaaagggtagatttgtttatatgctctacagtacccagaacatttctgggaatgtagaaggtactaatataacagatttttttttagacagtcttgctctgtcacccaggctggagtacatggagtacagtggcatgatctcagctcactgcaacctccacctcccaggttcaagcgattctcctgcctcagccccccgagtggctgggactacaggcacatgccaccacacctggctaatttttgttttttcgtagagatggggtttcaccatgttggccaggctggtcttgaactcttgacctcaactgatctgcccgcctcggcctcccaaagtgctgggattataggcatgagccaccgcgcccggcctaatataacagattctatctacctcatttgtcctaccttctccaagtcctgaaggcagcagagagcagcatataaagcaagaaaagaggggacagatgtagcatgctcttaacacacaggaaaaaaaaatggtaataaaaacaaattctatcctaagacaaaagtggtaaaaatgtaaattcttactttgttccgttcattatttcatatatagaaattataagaaatcccaagactaggggaatgtgaatataggtagaaaaaaacaaaaacatgagaattctacgtttagcagagggaccttaagaacctggatgtttgaggtttcaggagtctttgacagcttttgaggaaggggctgaaggtctttggtctctagagcaaggggtggcatagtaaaggtccatatagtaaacattttaggttttgtgaaccatacagtctatcacaactattcaactctattactgtatcccaaaataagccataaacaatgcattcaaaaaatgggcattgctgtgtcccagtaaaactttatttataaaaacaggttgtttttataaataaagtttgccaaccctagatctacttggcccaaccactgttaaaagcttatcatatttgtcaaatttactttttacttccagtcctattttctgcccaactcaaccagaggaagttatcaccccatagaaggcatttgtggtcatcactgtgacttggaggaactagtggcagagggtcagggatgttaacattcttcaaggcaaagagcaagcctgcacaataaagagctgtcttgctgaaaataccactagcactactgctgagaacaggatggcttatcccgtccccaaccccacaaagctgcttatgttcctaagcttaagttgtcccaagtacgaaataaactaagaggttcaaggtgacaatgaccatcactagttttttctttttattaggcaggtatgcatgtgtgcatatacatacaaacagacatacacacacacacgtgtaaacacaggcttacagatttgagaaaaaagaaaaatgtcctctcttctcaactgcactgtcttttattttgaaagcataaccattgctgccagcagaggcatccctcaatgaaatgtgctttgttgccaacgaggcctataaaggtttaaaggaacaagtgagctgttttccatgctaaacaaagcaagaaatggtgggtatttacttcactatcatcaacttattcaattcttcccccttctcatttctctttggtttacttctgttggcctgcaaacaaagggtggcaccacttagttcctccatttttagatcacaggaaacttggcactgaacaaatcaatagtctctcataatttctgcagcatatctcttaattcaacttcagtttggaacagactgaacagacacagccctactgcagctgttggataggaagcattaaaagataaaaacttggtttaaagtcactgtggttaataaatgaccaaagtctgattccgccagtttaaggacaatcttaacagtatgcaactgaagtagcacaaggaaggaagcaaagggaatagttccatggactacaacagggcaggatgagataatgccctatactgaggtaaagaacagctggtgatcaagctaaataagttagatagcacactcatttaccaaatagaaatgtcaatgtgtttagctactttactcccaattagacttctaatttactgtggctttaaatttaatgagctatatagttaacagcttattcactttataaatatttactgggcacctaccctgggacaggtagaattctagtaataagtactaaggatgcagcacccaacaagatataaaaggtccctactattcttccagatcttactttctaaagtgtatgcatgttagaaggggacagggaaagaaagataacaaacagttaaaatataagtgccgtgataaaagacaaatggaggaatgtgatagggagtgaccaagtggctattcggaatgggcggtcaagaaaggtcttcctaggaacgcattcaagctgagacctgagtgacaaaacgtggtcagacaactgaaaatctggagaaggtccattccaggcaaagggaagaacctggggcaggaccaaaccatgttttgtggaaaggaaataaaaccagaggaaaggaagtcagaggtcagggaggtgggccgaagccatgatcacagagaatacaataagccatagttatgcatgtggatttaattgtatgtgtgatgaagaatccacagagtttttatacaacagtgagacatgaattattgatttacatttttaaaagatcagtcagacccagaagaatagacagtaagggtacaaaaatgtacacaggaaggctagatatgagacaaccaaagtaatttaggtatgagataaccctagataaggatagaagtgaaaacagaaagaggaaaaaagatttacaacacactgaaaatgtacagttggctcaacttggacttggtatgagtgaaaaaaagaaagaaatccaggataatttgggttacctggaaaacagagcctgaggccaaagcttactggctaaatctttattgagtggataggatcccacgcaatcaagagtgagggaaaaacagaagtaagccatgaagaaagaagaataaatacaaggtctatgttaagctggcaacagctccacaaacacagatgattgttgatctggagagcaaaaggaaaggagcaagcaaagattaaaaaggagaggacatggagacaaggacaagcatgatagcatggtggtgtggaagatgagagagcagtgtatttaggaagactgtggtcacctgtgctgaatgatgagaagcacaataaatgacaacagagaagtgatgactggatttgacaacatggaggtcactgataacctttacaaaagcagtttcagtggattcatggggacagaaatatgactggatggttcatcaagaaatggagtttgtagtgcagtgggagcagagaaatggcagagcatttggagagaagctttttaaatggatgttatcagggtatgtttgcatgccagcaagaaggaccgagagaaaagaagaaacagattatataaaaatgagaggacaatttcagaacaacgttcctgagaaggcacaaggggatggggtctagagtacaagtggagtggtgggcctttgataattacaatggaatgatgacagatcatataggcacaaatacagtaaggttggaagatgtgctggtgagaaaataaagtcattctacactgactgtatctatgtttttccacagagcatgaggcaaaaccactgtcattaaatatactgatgtgagtaatctgcagaatgtgggtcacacagcaagatcaccctcaaatttacattagtaggtatactttcctagacaagaacaaaatgcatggtaaattctaatttatattcctgcttcatacacatacaactgattctaacagaaaaatcagaccagttagctagacagtcaaatatcaccatctagtggctgaaactttaaaagccaagatgtcaaagttgggactaacaccgtgactcttgagaaggtataacctagtttgtaataattctagaaaaagccacttgaacaaaataatttacaaaaatatatattactactacaggaaatataccaagaacatataaaatcctaaaatattatatctaaagtacattcacttggtgcttattaggtgctaggtagcatgcttttacatggactttgctctttaatcctccaaaattctataagatatgtatcaccatttgacctatgaggtagaaattgacaaaaaataactacccaaagtttatgcagatagaaatgataaagttgggatttgaatggaggtaatctgacttcaaaatctacactcttaaccactatactcactataccatctctattaagcaccaaaatttcttgggggttgggtagaagagtaaaccagatttttgttaaaaagaatcatgaatactctaaggtaagacttctgaatttaaaagccactcaaggttgagcatggtggctcaggcctgtaatcccagcactttgggaggccaaggcaggaagatcgcctgagcccaggagttcaagatcagcctgggcaacatggcaaaaccccatctctactaaaaatacaaaaaatcagccaggcatggtggcgcacacctgtagccccagctcctcaggaggctgagggacaagaatcacttgaacctggaaagtggagattgcaatgagacaagatcgtgctactgcactccagccgcctgggcaacagagtgaggctccacctcaaaaaaaaaaaaaagactggggacttctgctactatcctacaggtgatgcacaagagttactaaagaaggctgacagagtgataaaataaccaagacccgaaaatacataatatccagattcaaaattttactgaaatctaaattatctgtcaattaacttgcaatataacagcaaattcagaacacaaagacatcatgaacacatataaagatatatgaaacgaatatagaattattttacatttgacaagcactcaaaactttgtttttttaatcaaatttactggtgtgtgatttatatatcaaaaaacgtacccacttgaagcatactttctgatgagttttgagaaatgtatatactcatgtaaatacaaccacaaccatcacaataaagaacatttttgtcaatccaaaaagttttctgtgcccctttctcgggaaatctaccccaactgctgaccccagacaactactgattttttctgtcactatggattaatttgtctttagacagatttataaaattggaatcagacggtatgtactcttcctgacttctttcccttagcatgtttctgagatgtcaatcatttctttttactgctcaagagaatactattgtatggatataccacaatttattcattcattcacctgctgatgaacatttaggttgtcccagttcatggacactattaataaagctgctagagacattgttggaacagtctttgtgtggatataatgttttcatttcttctgaattagtatctaggaataaaactgtgagattgtacaataaagtatatatttaactttatgtgaaacaggccaggcacagtggctcatgcctgtaatcccagcactttgggaggccaaggcaggcagataacctgaggtcaggagtttgagatcaggctggccaagacggtgaaaccctgtctctactaaaaattcaaaaattagccaggcatagagtggtgcgcgcctgtaatcccagctagtcgggagtgctgaggcaggagaattgcttgaacccgggaggtggaggttgcagtgagctgagatcatgccactgcagtccagcctgggcaacagagcaagactccatctcaaaaataaaataaaataaaatataaaataaaatacaatacaatacaatacaatacaatacaatacaatacaatacaatacaatacaatacaataaaatacaataaaataaaatacaataaaatacaataaaataaaataaaataaaataaaatataaaataaaataaaataaaataaaataaaataaaataaaaaagtgaaacaaccagacagtttgccaaagaggtaaagctattttacattttcatgagcaatgtataaaagtttaacttgctccatatctttgccaacacttgatactgtcaatcttttcaatgttagcattctagtaactaggtaatagtatctcattgtggttttaatttgaaatttcttgatgactaatagtgttgagcagctttttttatgcttcttggtcattcatatattttcttttgtgaagcatctgctccaactttttacccattctttacatgaatagcttgtcttcttcctactgagttgtaagagttcttctatactctggaaacaagtcctacgtcagatatatggactggaaatattttctcccagcctgtggcctgacttttcatgttctcaattaagccttttaaaaaccagaagttttcatttgtatcaactgaccacatacatgtgggtcatttctgtatcatatattattttcattgatccatgtatgtctatctttacactagtactataaaggtataacattcaaaaacacagttaaggacttaaattaagtaatataagttccctaagtatgttttatttcataaaattcttttggctagtctagattctttgcatttccacataaactttagaataagcttgtcaattatctcaaacgcaagcttgctgggatttcgattggaattgcactgagtttacagatcaatttcgggagaactgatgtattaacaaaatactatcttccaatctatgagcattgatatggtttggatctgtatccccacccaaatctcatgtcaaattgtaatccccagtgttaaaggtggggtctggtgggaggtgattggatcatgggggcaggtttccctcttggtactgttctcgtgatagtgagttcttgcaagatctggttgcataaaagtgtgtagcactcccactccccacactctctcttcctcctgctccagccatgtgaagtgctggctcctacctttgccttctgctatgattatagctttcctgagggctccccagaagctgagcagatgccaacattatgcttcctatgcagcccacagaaccgtgagccaattaaacctgtttttttcataaattatccagtctcaggtagttgtttatagcagtgtgaggacaaactaatacaagtatagtgtatatttattgatttatttaggtcttttaacatttcagcagcattttgtagttttcatatagtttttatacatgttttgctgaatttttttcctaacaattttagatttgggaataatactacaaatggtgcttttttttaaaaataaagtattcagcttctaattgttttattttacatccattattggcttataagccttttattattttttaatggtttctctagggtctaggtttgaatacaacataacagcctaatagcaatataattccatttatcccttcatgctatctattacaattgttatatatttacttctatataactttgcaaaatgttgctgttgttatttaatgtcaattatctttttaaagaatttaaattttttgtttaaatcagtcttcatacttacccatgtttaccacttccagaaccctttcattctttacttagacacaaatttctatctagtatgattttccttctatgtaaagaatttcttttaatatttcttgaagtccaggcctactggtaatgggttatctcagcttttgtttgtccaataaagttattttgccttcatttctgaaagatatttttataatacaaagaattctaagttggcagttttactttccttcaaaactaaatgatgtcattccattatcttgcatagacctccagctgacctcagcttctacactccgaaatccatggccacatatgcagcaaggataaatatctcatggcttttctccacattaactggaagtagcagaaataagaagaccagctcattcccgaggggcatgggactccaatgagggacaactctgacttgacgactatccaaggtattgtccaactttctttagataatatgacagcctaagacatttccatccaaccttccctccctctccccttcactgggggttagacaagcatagctctcccagatttactcagttcccaccccatgtcctctcatacagtgattcccctaatgaaatctttgcatgtttaagccggtcttagcatatgcttctagaaggacccagactagcataactgttcagtatattttttatttcagatatcgtatttttcatttctagatgttcctttt

SEQ ID NO: 236 - DNA, 3054 bp, Homo sapiens
  source 1..3054: mol_type = genomic DNA; note = NC_000011.10:c116792420-116789367 APOA5 [organism=Homo sapiens] [GeneID=116519] [chromosome=11]
ataaagcagaatgtctgctctctgtgcccagacgtgagcaggtgagcagctggggcagagggatgggggtcacagtcctaagggagggcattgcaggtggcctcaggggagagcctggggtggcccctaagacgtcctcttggaacattttggcagagttgcctcttcgccctcattatggctcagtttttccaccatgaaatgggagggagggagacaggtgggcaggggagaggtggtagaagtggcctagagaactgttcctggggtctgggacctttgcgaaggggttagagcaccacgctccctgctatgtgactgaggtagcaagagcacgccctcttcccatgtctgaggaagacaccctagcctccttgactcacctaggtcagtcctcttgagccccaacagctctgtgctccccagcccaaggaaggggtaacaggatttcgggcagttgcccctgcagaggccccctgggcaagtcccctgcgccatgtcccttcgtctccttcttcccctaaccaggcctccctccacctgtcttctcagagcaggtaatggcaagcatggctgccgtgctcacctgggctctggctcttctttcaggtgggtctccgaccctgacttcaacgtgggggtgtgggtggaggctggccagagggccctgtccaccctgggggaggagagcccaggccctgattacctagtccctctccacagcgttttcggccacccaggcacggaaaggcttctgggactacttcagccagaccagcggggacaaaggcagggtggagcagatccatcagcagaagatggctcgcgagcccgcgtgagtgcccaggggaaggggtgtaggcgaagggaggagacagctgggccatgccatgatgacctgcctctgctgcctcaacctctgtggccgctgctgggacagaggaaaggagcggtgctagctctgtctgcagatcccggccatcctgggctctttagcgccctctgcctgcagcccccgccttgacaactccgtagctgttgcccccttgctcactgaggcgcgggacctgggatcaatcgggaggacgcccgctgcagtccccagaatcaaaggatgatgtggcgcatctatgtttctttggagagtgttgtaggtctggatttgtatgggcaatgtgtttgtgcttcgtgcgtgagttgttactggccagggctaggacaagagccctcgaccctggggccaacgccctgcgtccttggttcccccagaggatcagtgcgcgatgacttggggacaaaggagatgatggaggctagcagtctgacggcctggatatctgtccccttctccaggaccctgaaagacagccttgagcaagacctcaacaatatgaacaagttcctggaaaagctgaggcctctgagtgggagcgaggctcctcggctcccacaggacccggtgggcatgcggcggcagctgcaggaggagttggaggaggtgaaggctcgcctccagccctacatggcagaggcgcacgagctggtgggctggaatttggagggcttgcggcagcaactgaagccctacacgatggatctgatggagcaggtggccctgcgcgtgcaggagctgcaggagcagttgcgcgtggtgggggaagacaccaaggcccagttgctggggggcgtggacgaggcttgggctttgctgcagggactgcagagccgcgtggtgcaccacaccggccgcttcaaagagctcttccacccatacgccgagagcctggtgagcggcatcgggcgccacgtgcaggagctgcaccgcagtgtggctccgcacgcccccgccagccccgcgcgcctcagtcgctgcgtgcaggtgctctcccggaagctcacgctcaaggccaaggccctgcacgcacgcatccagcagaacctggaccagctgcgcgaagagctcagcagagcctttgcaggcactgggactgaggaaggggccggcccggacccccagatgctctccgaggaggtgcgccagcgacttcaggctttccgccaggacacctacctgcagatagctgccttcactcgcgccatcgaccaggagactgaggaggtccagcagcagctggcgccacctccaccaggccacagtgccttcgccccagagtttcaacaaacagacagtggcaaggttctgagcaagctgcaggcccgtctggatgacctgtgggaagacatcactcacagccttcatgaccagggccacagccatctgggggacccctgaggatctacctgcccaggcccattcccagctccttgtctggggagccttggctctgagcctctagcatggttcagtccttgaaagtggcctgttgggtggagggtggaaggtcctgtgcaggacagggaggccaccaaaggggctgctgtctcctgcacatccagcctcctgcgactccccaatctggatgcattacattcaccaggctttgcaaacccagcctcccagtgctcatttgggaatgctcatgagttactccattcaagggtgagggagtagggagggagaggcaccatgcatgtgggtgattatctgcaagcctgtttgccgtgatgctggaagcctgtgccactacatcctggagtttggctctagtcacttctggctgcctggtggccactgctacagctggtccacagagaggagcacttgtctccccagggctgccatggcagctatcaggggaatagaagggagaaagagaatatcatggggagaacatgtgatggtgtgtgaatatccctgctggctctgatgctggtgggtacgaaaggtgtgggctgtgataggagagggcagagcccatgtttcctgacatagctctacacctaaataagggactgaaccctcccaactgtgggagctccttaaaccctctggggagcatactgtgtgctctccccatctccagcccctccctctgggttcccaagttgaagcctagacttctggctcaaatgaaatagatgtttatgatagaa

SEQ ID NO: 237 - DNA, 384484 bp, Homo sapiens
  source 1..384484: mol_type = genomic DNA; note = NC_000007.14:c144836424-144451941 TPK1 [organism=Homo sapiens] [GeneID=27010] [chromosome=7]
gcgtgagtcaccgcacccggccaggaaggaaagcttttaacccgacggctcagggaggacaccggtagcaggactagaagcagcacagtggaaagtaagtttggcttggaagctaggtcaagcatgggtgatagggaattcgccacttagtttgaagcaaatggcctccttgttaaagctgagtgcagagggcccggcagcagtactacagctagcagaaccagcccagaaaacgaagccttggagacttgaggtgggtagtgccggacgcagagcacagggcgcggctcccacttgcctccggctcccggaagcgggcggggccacctcgcgtcccgggggctaaaacctgcgagcgaggaccgcgcgccaaggctcctcagccgagcgccgagcggtcgatcgccgtagctcccgcagcctgcgatctccagtctgtggctcctaccagccattgtgtaagtgcgactgctgccgggcgcgcgggccgcggaagggggcggccgcctctcgctccccaggttcccggatggtgatgggttcgcggagagaggcggcaggggcaacccctcggacctcatagcggcccgcgcggccggtctccgggggcccccgcccgcggcggtgctgtaggcgagccgtggcgggtccccagcgccgggtgctgcgccgcagctcagctggctcctgggtcccggagcgcgccgctgccgagtgccaggttcaggcggctcccgtgctgttggttctgcgcgatgtttaattaaaactgagagtctaacttcacttttttttttttaatgcagaggccaataatccgttatggagcatgcctttaccccgttggagcccctgctttccactggtactgtatttctttccacggtttagtgtcactgacgtgcccctccccagcgacgggaacaggtcgaaaggacggggctctagagccagcgtgacttccagcctgggttctgtccctgatttcctagctctgtaccgctaagcatatcagcctctcgccggtctcattttcctcatctgaaaaatgagcttacgtatcagtccttgctgtgaggacgaaatgacaagatacagtgtgtgtagtccgtgtggagcccagtaagcgcttcccggctgttgcgcctccaccaacagcgcgaacaaatctggaacatagcggaacattagacattgcaggcattaaggacggtcatcgttgcctgaccgtgatgcatttttaatccattgaaagtgccccgagcttatctaataaaagattggcaaatgattatatcaagtgttttaaatctatataacactcaggatattttattcttctaagatttgaaattactgtgtaaccgagttcaggctgggctgctcgctgcttgcagagccaatcaacaaggacgaagggcccggaaaggaaagtgactactttccaaagctagcaatggggaagtagtccaagcttctgccttaacgaaaccatttcaaatttggacaaaatgtaagagcttataaaggggcgcttggtattggggctcgggggccccagtctacgtgacttgctcagatatttatcttgggtttttgcctcatctggtgaatgggctggcgcctgagtataactgggttgcaaattaactgcagccttgaagtaatctccaggtggaggagaattcagtagtcgcctgaattgtttcaagattagtctctggaacttcagacgaacacataattagataagggaaacgttgtgtaagggtgttcgtgggggaaaggagagcaaagactattatctcattgttaaaggtaagacaaggcatcgcacaggaaagagaaaaacttttgaaaataagacattcaggtacttcacatggaaatagatggaatgaatgagtttatgaggcaggttgttagcattcattcttgtgtaataattgactactgtgtgataatttggtaatgttaaagtattttcaattaactattagttttttctcataactttcgtaaatttaaacagaaagtataattgtttaaacgtttacatttgttttctgtcaacatgaattcatgggtcgtgttttgggcattgaatttaacttgtacgtttttccacatgctgggaatagtaggtgacattgactccttactcccaagtcatgtttttgtttgtgacagggtcttgctttgtcgccctggctggagtgcagtggtgccatcatggctcactgcagcctcgacctcccatgctcaagcgatcctcccaccttaacttctggagtagctaggactacaggtgtgcactaccccacctggctaatttttaaattttttgtggagaaggggtctccctgtgttgcccaggctggtcttaaactcctgggctcaagtgatcccattctcctgcctcagtctcccaaagtgctgggattgtgggtatgaactaccacgcctagttatgctaaaagctttatatacatatacatgtttatgtcttattctacaggtgaaggaaaacagttacataactagagtcttaatccctttattattttagtagattaaaaggttgagtgtttattactttaaacagcttttcaaagttaaaaaaaaaaaaaaaaaaggccaggcgcggtggctcaggcctgtaatcccagcactttgggaggctgaggcaggaggatcacctgaggtcaggaattctgagaccagcctggccaacatggtgaaaccctgtctgtactaaaaatagtctctgctaaaattagttggttgtggcggcacacgcctgtaatcccagctacttgggaggctgaggtaggagaattgtaggagaattgcttgaacctgggaggtggaggttgtagtgagctgagattgcaccattgcactccagcctgggagacagagagagactccatcctccatctcaaaacaaaaacaaaaacaaaaacaaaaacaatccaaagaaaaaaaaccccaaaaggcactgggaagcacattttgcaaatttcctagttctcgtttatccagtattaccaggacaaacagcattttctagagtaaacatttgatttgggtgaaatgttgactttcagatttgttactgaaacctaagagcattactgtctgaagatttctaatggtttctaggttaaaagacatatatcagggatactgactgctgcataataaagattgtattgaggaactataatatctgggtttaaatcctagctttgccacttaatagttatttcaccttgtacttccatttcttcatctgtaaaataggaatacatcatagggttattatgtgtataaatgaattagtacaaatcaagcacttagcttcagtagctataagctgttcagcagtaagtttgaggggaaagcaaaaaggcagttgaatctcagggtggatgctgagatggaaaaggagggagctgatagctctgcccctttgtttttaatagaggcttagtggagaaggccttgactgcttaagtcaggacatttgtaagttccacattggagcaaggcctgtagggaaatggtgatatatgaagtacagatccagggaacagaatccagtgcctggcctcttgggtggttctcacagttacctcctgttgttcctatgggtaaaactgtgtaggattcttgtcttatctctagttttgaccttgaaacaaggatttgggcaagtttgtgattactctggatatgtataaggtgtttaacaacagaactattactataagggccagtgtgatgccggatcttttacagtaattcagtaaatttttgaggttaatttttttattggagagattccctttatcaaacaggttcagtgtttaatactcacctggcagagaagttttttctgataccagcttctgtgaattttatttgttggtatgatttatctgtaatgcttattaagatttagtatagtggacaatccaacaataaaggtagttctctacagattaagaagttgctaagaaaagttttgtggaccaaaatacttaaccctctgggatgatcactagcccagggaaagatggaattctttttaaaattcttttttttttttttgtaactaagtgctcattatttaagaaaaaacaactatctgccctagaatgtgaaagtttcctgtactcccttttccagaaataactattatttctcatactttaaacaaaatgtgttcatattataaattgttttgtaaattactgtttgtgggcagtgagttaaaatacataaatatttgttactacaaacatcacatgtgctctttgttcattttttttccaaactaaaaaatgtgtcctagttaccggacattatcagtctaaaaatttatgtgttcttttaaattttgtgtgtatgaataaaacaaaaataggcctattgaatacccttttctgcaactgttttcacctactactttgttatgtctatgtgtatagatatcccaactgtttgtttttttaatggacagtaatggactgaaattcactggtcattctttttttttctttttttttagagacagggtcttgctctgttagcccaggctcaaatgcagtggtgtgatcattgctcactgtaacctctgactcctgggctcaagcagtcctcctgccttggcctcccaaagtgttgggattacgggcatgatccgctgtgcctggcctcactagtctttttttttttttcctgagacagagtctcgctctgtaccctaggctggagtgcagtggtgcaatctcagcttactgcatcctctgcctcctggcttctcctgcctcaggctcccaagttgctgggattacaggcgcctgccactgcgcctggctaatttttctagttttagtagttacggggtttcaccatgttggccaggctggtctcgaactcctgacctcaggtgatccaccagcctcggtctcccaaagtgctgggattatagaggcgtgaaccactgcgcccggcctggcctcactagtcttaatagacatttatgttacttccaatttgtactgttacagtctacaatgcatatttttgatcatactatttttcatatttatgtattttagtagtgtaaatttctagaaatgcagttgccaggccagagggtgtgtctgtatttctggttatcaaggggatctatcagctaactggtgtataccctttggtactaggtgctgagggggatacaaaattgaaagaagtggtcccttctatctaggagtttatgggctaattgagtgtcaagaacaaaacataagattccagtgagatgctgaattatgtattgtagaacccacataggaactgtagacaccgggatgagaggcaggctggagtcggcagataaatcatggggtgagtcagacatcagctgggcctgcaaaagagcactggatttaaatggagagaagcacagggaggtttccagaagagcatcgcaagtgatgggccatcctagagagagaactcagtgttgcatctggacgtgaaaatggacacggtggtgagagagagagagtgtggccaggttggagagtgctcatgagggttttggaagaatgtggttgaacagtgagggtagaatcagattgtggaggaagagacatttattgcagagaaagagatagtttttgaaagtttctgtgtcttctgtctttggaacattctatacaaagcagctttttataaacagtaatcccccccatatcctagagtgatatattctaagaactccactgcagcgagtcacccaactttttttggcaccaggaactggttttatattagacagtttttctatggaccactggaggggtgggtggtggtggtttcaggatgactcaagccattacatttattgtccactttatttctattattgcattgtaatatataatgtatgtaggtatttattattacatgtaatatatacagtgacagatcatcaggcattagattctcataaggagtgtgcaacctagatcctttgcatgtgcagtccacaataggctttgggatcatgtgagaatctaatgccctgctgatatgacaggaggtggagctcagcttcactccttcctgccctactgtgtgggtgggttcgtaactggccacagacagtctaatctacagatgatttaaagtatacaggagggtgtgtgtaggttatatacagataaggggaactactgtactttaaaactcatttagttgtgtcattgatgtcatggttctgatttgccaaccaactgtaggttaaagtccttatcttgaaggcagttttcaagcatacaatatattatttattaactgtagtcactgtgatggtacaatcacctctttgcacctaaggtaaactcacatacccactattgccttataggaacatttgttcttgcttcagtgttttcccttagctcatgctaaatttgccacctagaatgatctttgccaatccttagaattattattcttaaattttagccattgtggtgggtgtatagagatgtctctatgatttttgtcattttccttatgacagatttctcataatgtgtttattgacttttgctcgtcttaagtgtttatggctcttactcattgtttcaattaggttatctttccttttttataaaaacgtattttaggagttttttttttttttttaatatattctggttgcagttctttacattgtgattttctcattattaaaatagggagaatgacactttccaaggagagttgtgaaaattaaacaatatgtgtaaagcatgtaatggtgacatgtaagaattcaagcattttaagtattttttgtctttttaaacttttcatctgaaaggtttttatttttaaattaatacagaatatttaactggtaagggtgtactatggctgtttgaggccttgtaaactaggtgccttttcagcatagtcttagacatctaaactttttgctttgttcttcagtgcctgtgatcatttcagtttttatcatgaagatttatgttcagaaattaatatgctttaaactttttttaaaaaagtaaagttgatttacttgaaacactttattgccaaaataaaggtaaatagtcaaaactcagaacagttatttgccatgtacttatttcacaaacttttaagacacagcagttacagaggttttaatttccagtttactaagaatactgatctttttatttttattttttcaacttttttgaggcatgattgacaaataaaagtgctatagttagccacgtgtggtggctctcacctgtattcccagcacccatctgggagaggcccacctatctgacttcactgtactatatttatctctttaaagatcctgtctgcaaatacagccatattctgaggttctgggggttaggacttcaacttatgaatttggtgggagtgggggggtgggtgggcacaatttagctcataacaaatagggtatgtcaattagcttttcagctgtaaactaaaaaaaaattgactgggtccatatttcagtattaccatgacttccaaaaaagaggttttaacatgtaattctaatagcatagagctagtatatgaatcagagagtcaattttggtcttatttagtttctgttttctacttacatacaaaggtttctctgttcattcctgcttatccattatgggccacacatctaatagatgttgtaggaaaataaaaagggttgacaaatcttactgtgaaagatttcagtacataacaggctgtttagtacaacacaatggaaatgtaatttcgtatgttatataattcaaaattttctaatagtctcattataaaggttatgaattttaattttgtttgtcttatttaatctaaaattatattattttgacatgtggtcaatagaaatcactactaatgctatagtttccgttttttgcacagaatcttcaaactcaggtgtgtagtttacgtatctggcacatctcaattcagatgataaattttcattagacatacttgatctgtgtttaatttgtggtaatttgtcaaatgttttgtttttattcgtattagcaaggagtacgtcgtagccttgtaagtttggaaagaacttcataggcaaggaaaagaatatttcttttccaaagaaagccttagaaatagatactagagatagaactggactaaaacctaggttttctgaatgtctatttcccctaaaattataatgacttttgttcttgttgtttaaagcagtattcttgctttaaaacctagaaaactttcagggttattgttgattggttttttaagacactttctttttttttttttttccaaagagtgagcagtagcaagatttattgcaaagagcaaaagaacaaagcttccaaagtgtggaaggggaccccagcgggttgcccaagacactttcatctggtatggtaaagaaatctctgactaaagctgctgtgtaaggattagccttatctgctgcttaaggattgtgatatttttgttatcaagggctaagatagtggaagatacgaatttgtgaattccagagtttcaaggatcttatggtactctcctacccaatcagaaatcctcctacgtagctctcaaatctctggaatgtttccaggacactcactgtgttgactgttcatgcttttcttggcgtataacttataattgttggaattcttcttttttatttctttcaacctatttctaatttactgagacttgctgttaactaccctttacttattttttacttattacttactgcatttggtatagtttaacttttcttcgtattttgttttattttcatatttgccttaatatttgctgtccttttttttttttttttttttttttttgagatggtgtcttgctctgtcgcccaggctggagtgcagtggcgtgatctcagctcactgcaacctccacctcccgggttcatgctattctcctgcctcagcctcgcgagtagctgggaccacaggcgcccgccaccacgcctggctaagtttttgtatttttagtagagacacggggtttcaccgtgtcagccaggatggtctcgatttcctgacctcgtgatccgcccgcctcggcctcccaaagtgttgggattacaggcccgagcccagcctttgctgtacttttaattagattagttatacttgatgacaacattttgattcatccttgttgtccgtgagcaaattgtttctcttgccttaaataagatctcattaactttataagctatcttttccacatcatctagacaatcaatttcctttgattcagtggtatttagtcttatggcacctgcccccccatctttccatattagcattttaatagttccatgcttttagaaactaaaacttctaaagtgagtttaaaaataattttaaatctttaaaaaattatctaaatttttattttgtagcagtattagaaaaaatggtttttttagatgaaaaaattgaaaatatcaagtgagcctgtggggtagttttaatattcacaatgataaaatattacggcataattacaccaaaaaaatctgtgggtattgacacattaacacgagatgtctttgaggttttctaggaaaacgaggtgaatttgtgcattaacttcccatcaaatacattttattttttttgttgctgttggtaaaatgcatctgaaagttattctttgtaggtggcaaacaaatgctgcaacaaatggatgttattctgagtatttctgtgtctttgtcacaccattgtctttgaaggtattcatttttcacagtggaatagtttcttttgtttttatgagttccagtgaatttaagcttttgatttactcataggtcatgtgtaaggttttggcttgccagcccaattgctgccaaaaaacctttttttcttttttcaaaataggaaaactgttctagaaaaagtttcttcctaatccaaatacacatgctctgagtgaatcctttggatgggtaggagacctttgaaacctttactgttcctggtgtgtgtattccttagtaatcctctgagatagccatctggtttttatgctggaacatgttcagatagctcagtctttttgagaaaacatgtagcattattggacagacaactgatgactaaaatatgtattttaaaaaagctgaagtttacccttagctctctattttccaccgtaaatagcatagaagatctttacttgttttctacctaattacccttcaaatactgaaaaatcttaatcagatcatagccatttgttgaacaattatttgagtgcctgcctgctgtgtactgggaaccattctaggcatgggaagacatatcaacaattttcttttcatgtaatgctttccagcctatcccaatataggtatcagttacctacttttggaaaatcagatgtccttgtcaagaatgcttactgggacctgttttcgttattttattttattttattttggagatggagtctcgctctgttgctcaggctggagtgcagtgacaatcttggctcactgcaacctctgtctcccaggttctatcgatcctcctgcctcatcctcctgagtagctggggctacaggtgcatgccaccacgcctggctaatttttttatttttagtagagacggggtttcgccatgttggccagggttctcttgaactcttgacctcaggtgatctgcccgccttggcctcccaaagtgctgggattacaggtgtaccaccatgcttggcctgttttgttatcttaaattgcagcttctgtaggatattgagaatcctgaacaggaaggtcttgataaatcatcaggggagacaatcagtgctttgagattaaagaagaaatgaaaagaggaagcgggagcaggaaaatggaaggtcgcacagttgcataccttgtttaagtttataaatttctttgtatggtgctctaaaaccttgttacttaaattgaaattcttaggccaatagcattggcatgcctcagtgcctgttagaaaagcagaatctcaggccccacttcagactgactgaataaatatctgcattttaacgagaccctcggtcagccttaatgctccttaaaatgtgaaaggcactacccaagaggaatagcaacttccttttaaaataattaaaaacaccctccatcacatttcatgataacatttatcattatctagaacttcttttcaacgattaatatccagtggttttcttttgagctttattgttgtctgtgaaaatgtatagtgtgatgaggcattcaggacacatacccagtggcagaggatggctcacctgagtgcgatgaggtgatacctttttccacaccagcaacatctgaggtgcatatccacttttttggcccttggtctgcctttcaaaatgtctacacgtaatgctgatattttatcaatgtaattggttaagatataacttcaggcttttctcatatataattttgttttggtgttttattgagtttgggggaagtaaatctaaaattttcctttggaattattggccaaaaattactatattatgagatatatacactctataaagtttgggtgttaaaatcacacaaacaattttcttttggaaaatcgttaaccagagagatgtttgtaagttatgcttcttcaggcatttcaattcctgagtatccctttacaaatgagacatctgtgactgaatacattcttctagttatggcttaaagccaaagaaagtagtcacacgatcacattcttttctctggatgatatcatcctattaaataagcccatgcttttgattttaaggaatgatagttgaagagttctgaagtttgaagtcagtaaagctgtttctgacctcacttttttttttttttttttggtgaatctcgcatctgaattggttactgtaagtcagaatatatcaaagctttttgaaaatggaattaaaatggcctctttgtgaaaaatacttgttaatacttgtaattatggtttcatttctatagaggaaacatatgttttcaggctgtttaacattttatttattgagccaactttgtctgttatgcatgtagcatcatactaaatccatgcaattgaaatacatggtccaagtttccatagagattatagcctagtagggcaaatggataagcaagtgagacattagagtacaatgtggtaagagacatgtaagggcaaccttggatcacacaggaaggatttgggggtttattgaaggcttctggaaagaagaaatatttaaggtggtaaattaacttgttttaaattttttatttttgtgattaacactgtgagatatttatgtaccttagtccacttctgattgtatgttgagtgtgtatttctgggagtagaattaaataatcaaagttatgagcctgtagggtttccagtacatgttcctaggtggctttccagaaaggctgtagcaggttatgtggcagtatcagcatattagtgtgtccctttcaatatgtccttgctggcagtggatgctctgcaattctggatggaaatattcatggattatagctgatcctgctttttcactcccgcatcgtgatttttgtggtactcttggtagtactgcccataatctaaggtgggaaaggttgtccaagacttgaaaatgatcagaaaagattactaggagtcttttcagtggaacgctgggcttgtttagtggatcctgaagtgactagatacagggtgtatacctttcactttttttttgattaggcaattttgcaatgctgtagggatagaagttaactaatagtcatgcaaacgattctagatggagtcttactctgtcatccaggctggagtgcagtggcacaatcttggctcactgcaacctctgccacccggatttaagcaattctcctgcctcagcctcccgagtagctgggattacaggcgcctgccactgctctgagctaatttttgtatttttggtagagacgggatttcaccatcttggccaggctggttttaaactcctgacctcatgatccacccgcctcggcctcccaaagtgctgggattacaggcatgagccaccgcgcccgaccaagattcttatctataataatgcaaatgaattttgtccagtaggatagaattgatttccaccctgaagaaatatccccagatattatgtttcattgctctatggtagacattactaaactttcagttttagtcttcagtgtctcagtaattttttcatggggccaccagcaccaaatacctaatagtaacttctactaagtaattgggtccaaaaaacctgttagtagttcatacagtgtctctgttagttcagtgaggcaccctgaatgctttgtcactcagcttggaaacccttcttataatagattcaccattgatttcagtaatactccacctacacacacacacacacacacacacacacacacacacacacactcaagtttgtactaataatctcattaattgatgagctgaataatatctttggcatgtgttccttttatatttgcatgaaggtcatgattctaaaccttttggaaattacactttaagcactaaattctccttagtttgttgttaatttaaaaggtgagtaaataggtcatcttaactttcttggaagtcagtttccttatctgtaaatgacctgtcatagactatgagaattaaaagtgaaaatgcacctgtaaaagcatagcatgcagcctttgaggacaatgtacaaagtgggcaggtcacacatacctgggagcttgtgggattcctcaggtgctcatcccacggaaaggacttaggctaggctcgcctgtgctgcagggtgccctgtaatcactccaggagaggaatctcaactgctgccctcccacccccacaaaagttccacatatttgctggaacctccaggtgactgtaatactgtgtgtctgggaacttccaggttactagagtggggagcttgtgttgctaagcagctaatttcagcctattcttgcgttgttaactctgacctgctgaactagctccttgaaaaatccagaaattggggaaggggaggaggtgaaatgaactccaggaccatctgcatttgtatttatggtccctcacttgttttttaaaaaagtgaaatgtatccagtagtcataactttgcatttagacagcagttatatagttttgtcattttaatttccatatgcttgatctccatgtgctaagtattaccttctaactacagaaatgactttatttcgccaaaccagtgagtgttggagtcaactctaaaaatattgtcctctccttcaaattttaaacttctaaaattataactaaaatttggaaatagaatagaatatatttaggtttgatgagatatccaaggaatggaaagtaaaagaagctggcctaaactgaagtacaaggctaggaatgtttatataggaacatcaggcatatattaggactgagaaaaataagatggtaatgggaatttacaagtaggtgtccaatacccaaagctctaaagtagcttacaaaaccagagtagttagggtgtgggaagcctggtggaatgtttatactgttttgttcaaaactgtaaaatagtttccttgtttattttttgctgtctgtcttgatccaggttactattatcataggaacaattggtttctgaacgttctctcttgcctattatcagttcaactgatttagtgttatctgtttcagtggatctgttagaatctgcctgtgacaattcttgttgattaaaaaaaaaaatgcaagtgaagggaacccatgtgcagaccagctcgtactaatgacattcatagaaactagtgattccgttgaagtgtgcattggactgtgacactagataactatgaaaggattaggcatatggtggtattgtatacttgaagcctatcataaatttaacctttctattactgttaggagatgagttattgtttccacttgccaggtaagaacaatacttgagatgagatctgacgttacgcttttgcccttgcactgctttttgaagtgtaaatggcttatgtttagtcaatcttcttgttgtgaaattgcatcatttttatgccatccaagagttagagctgctgatgcagctattagcagacacagaagcactactcagttgagacaatgtgttagaggtgggtgagttctgtgaggaattttctgctcacttgtaccacacaatttgtgtcatgtttgcactgcataaactgtatcattcatttttatatatttatatatgtttgcataatacaggtgattaccagtatttactgagagcttactgtatgcaaggaactattccaagttttctatgtattaccttgtttattctcacaaacattcttaaggggaatatactgttagccccattttagaaatgagaatgctgagataggtacagagaggttgactatcttgcccaaggtcacaggtccaggaagcagcagagttgaggtttaggcccaggtagtctggctgcagagcctgttgggtaaccactaccacaatactgattttgtatgtgtatatgtggtatggctgatggagttttatttctctttgaagacttttttccccaatctctacatctcttgtctctgagtttattctcagagacaagtttaataaactttcagtttattctcaacctggtgagtgagtctatcactatccttagtgggaaacagtacatcagttaaggaatgcatttgggtgtaagtaatagggaaactcatctcacagtagcttcaacaattaggaattgatttttcttaaacgatgaatctggaggtaggtggtggagggctggcgtagctgctgtacactgttgatagggatgcaggcctgttctttgctcttctgtctttctgtgttggccgttagcctcatgcttgtgatctcattagaggcaaggtagttattagaacttcaggcatcaaggatgcattgtaagcagaaaaaaagtatggagggattttaaaaagggtcacgccaacctggttcatccccctatatcagaaaactaaaagccttctcctaagatccacaatccacataattcacttttgttttatttcatattggccagaactaggttatgtggccattcctaaaaagcaatcacgtggaattctgttcttatgactgattttggccagaaacagttcatcttctgggactgggatatgggcatactagcaactaaataaactgaagtggtactgacagagaagttggatggatagatatggtggagacagtggacagaattggccacaggatgacttccaagaactctagccaaatactcaaggtttggaatcattgtaatcttgcttgtagttgggatctgagtgtttgaggtgaaagtttgcaggatacatctgccgtctttgatctcagattcagtggttcaattcctgctttttcttggaagcctttttgtaatactctcaggaatgtggtttctctggatttgggagtttaccttgatctttgttttctgcctattccagagctcctcaaatatgacatattcttactgctgaattccagctagtgatgaggccttgttacttgttgacaggtttctctgatactgtcctttgtcccacagtataatctgctttgattttttttgattctcttacccgagatgcttattttatattgaaccattcctaatgtcgcagttttgttcactgtgttcatatcattggtcaggcactattttaagataactgggtggtctgattatatgctaaagcatacaaaaatgacagtagcatgccaccaaattatttgcttttatctgaaattcaaattttaatgggcagtcaggcatttacattaaacattacttggtaatcttctatgggttaacttaaccaaagctgtgatatatgtcataaatacctaagatgtagttgtagtggtttgggacataattttttttattctcatattgtgttttcttttgatattcctatgtgtgctctttatgtctaacagaaaggattgcctatttttaagcttttggagaggaagagagttcagagaaaagtaaattgaggatcacaaggcagtatcacttattgagtggtactctagttgatctgtttgcttatgtatgctcttggaggggagtgacatgaattcttattcttctttatgcctcctatgctaagcatcctaccacatatatttagacaatgagttgcctttaagttgagttgccaggctgctcagctccaaatcaaattttaatgggcagtcaggcatttacattaaacatcacttggtaatcttctatgggttaacttaccaaagctgtgatatatgtcataaatacctaagacgtacctaccttgcatgtcccatgattttttcccctatcctcgcattggtgtcaaaaccctaaccaataaggcccgcagcctttggctagacttccttcactcaccctcttgctactgagcctcagcagcatctgctcatgagcatgttattgtggcttcaaatttcctcttggcaagccctgcctccaactacacacaaacttggggatttccctctcttgtgagggcagctatgtttttagagagcagtatttatttattctattccatccagcatttagaggggttcatgctaaaagagttatgtatatgggccgggcatggtggctcatgcctatagttccagcactttgggaggctaaggggggtggatcatctgaagtcaggagttgagaccagcctggccaacatggtgaaaccccgtctctactgaaaatacaaaaattagctgggtgtggtggtgggcgcctgtaatcccagctactcgggaggctaaggcaggagaatcacttgaacttggggggcggaggttgcagtgagccgagatcgcaccactgcactccagcgtgggcaacagagcgagactccatctcaaaaaaaagaaaaaaaaaagttctgtatcagcttagtctgctgtgtttccaaaactgtctttcttataaagcaaagaatcttatatacactgaaacctttaatagacagctgactgttgtatggactgtgtatatcacccaatatgatttattttttcctcatgattctgcattctgggctggatcaggtgggtctttcttctgctccagttgccaccttttgaggttggaacgtttaagatggcttcttttactcacatgttaggtgtcttttctggtaggcctggaaaaggcctggctgggcctgtctttccacatgatttctccagtgtggttcctggacctctttactaagggctccgagaaggtgcgtaccaggaaagtaatttctgatgtagaaagaagcttgccttatgcatgctaatgttacactgccaaagccatcacatgacccagctgggagctagaggtacaagcacttggatattaggggtgcgatttgggtaccatcagtataacagagtggtttaccaccttatacacattgtatatgatttcttgcagtcagttttgtggaagggagtgcattttattccattttgttttgtctacagtgaattttgttgttataactatcttcctccttttaaagttggcaaccataatattatacttcatattttgagataatgttagatttaccaaaaagttgcaaaaatagtagaattcccttatgcctttcacctggcttctactaatgttaacatactgcataaccacaaattaaaaattaacattggtataatgctgtttactaaactacaggctttattcagtgtccaccagttttttcactaatacccattttctggtgtaggatcgcatccaggatcccatattgcatttacttgccacgtctccttaatctttccaggtctttcatggcttggatacttttgaagagtagtggccagttattttgtagaatgtccctaaatatggggttgtctgatgtttcctcatgattagatttaagtaatacatttttggcaagaggcccacagaaacgatgtacccttccagtgcatgatgtcaagggtatgttatgttgatgtgtcttactggtgcaggtaaccttgttcatgcttgaataagctgttcttacccagctttttctactgtaaagcttctttctttttgcagttaaatatcttcaggtagatactttggaattatgcacatatcctgtttcttctcaaacttttgctcactatttttatatcccattgttcgatgggtttttatctgcaacaattattactgtgctgttctaatggtgattttctatttccctctttccttttacatttatttttattttattttattttctagacggagtcttgctcagttgtccaggctggagcacggtggcctggtcttggctcactgcaacctctgcctcccaggttcaagcaattctcctgtctcagcctcctgagtagctgggattacaggtgtgccccaccatgcccagctaacttttgtatttttagtagggatggggtttcaccatgttggccaggctggtctcgaactcctgaccttgtgatccacctgccttggcctcccaacatgctgggattacaggcgttagccgccgcgcctggctcccttttacatgtattaggatttttttgtaaggaaaagctgctccatttattttaaattgattataatttatatcaatatgaatacataggtattttatgtattataattcaatgctatttattttgttgctcattgttctagctttggcccttggaaggtcagtttggtttctgggacctttttatatattcccattctttctgagcattcttaatacctggcaccacaggatgctctaggctcatcttgtttgttccctgccccagccccagaatcaaccacttcaaggtgccttggccccttattggagaatggaatctagaagccaaggtctcggggctacctgtgctcattgctacggtggtgtcaattgcttcaaggtcctttcagtgactagagtcaggataatatgtatactaactcatgcatacatacacatctatattttggtatgtatatttatgtattagtgttcatatataataaaaaacattagttcatactgatatgttggattacagtccaacagcacagagttcattctagccttatcaatttccttatttgtaatttctctgacagtgaaaaacttggttctcattacctgtaatacacttatttgctcatacatactatacatataaagtggctttgcttaatatgtatacatatgaagtgaagtggatagtatacatgtaaaggattgctagcccatatccctgtgagaaacagacttattaactagagtaagaattttgtgtacagtctttttgtctttagccttacagtatctagtcaaaatactgttttccaaagttactttcaattgttttacaaaccaaatagttgttagaattgtcaaccataggaataactgaaggaagataggaaaagaggaaaaataggtagcaaatgaaggcattaagcctattttctgaggaaaatgtgtgtgtgtttttctttattcctggaccttttgacttctatgtttgttgcacagaattatcttagatgcttttggttagagtctcagtttgctggagagttgaggtggtacagtgagacagtgtttacatttctttaattgtgtatgttgcccgtgcatttttatttttatttatatttatttatttatttatttttgagatggagtctctctctgtcgcccaggctggagtacagtggtgcagtcttggctcactgcaagctctgcctcctggtttcacgccattctcctgcctcaacctcccaagtagctgggactacagacgctcgccaccacgtccggctaattttttgtatttttagtagagacggagtttcactatgttagccaggacggtctcgatctcctgaccttgtgactcgtgatccacccaccttggcctcccaaagtgctgggattacaggcgtcagccaccgtgcccggccatcccatgcagttttaaacacctaaaatgtgtaaaaattaaaaacagttccttttgatatacatgtaaaaagttaagtaataatatatatgagaatgatacgtgtattttcagccatatccctttcaccagttgttttaaaataattaggtaacctgcctgtttttactttaaaggttttttagtagaatggtctagtattcttatagaatgttaacagtataatccattaaatctttcttatagtggctgaattactgttctattgttttctagataaggctgagtttgtaaaaggttggggaagattttctactgatgatgtatggataaccttattaaaaaacagaaatgaaggctagcatgtagaaaaccttggagcccaagagattttgtcttttgtagagcttctaatttagatggtacatggtagtgactgaatgccaaatgaatgaaggttatgatagaatgggaggaaattggaacttggagaaggtaacactatgacaggattttagacttaaaaaaaaagatatttgacctggaaagccattgtaggaagagaggtagtgattgcgtatttaaaggagtttaaaaacaatagcagttatatttgctggaatattttttatgtgagccataactcatagaagaatggctgtctacacagtgttattctagtcaactgcattagatagcatctgggtgaatgttatataaatagcctgcttactgaaaaatttcagtgcatattacagtttataatatgttaaataaataatctatttaggaaaaaatgctgtcaaggtataatgaaaatgtaaatatattcattactttgtgttagtgctatggctactaaaaacatcaggttttaatgtatgtctcaggaggatttaacaagtaacaaaagtcagtgggtctaggaagtattaattgctggtttgagttcatcaaagttaggtctaattaagggttcacttaaagaggacaaaatgggatctcagaaaagttataaaaaagttttttcattagtttagcgatataacttgaaattggacctggaatggctacctgcaccttataagttacagtaagcagtattaatacaaaaataaaaaagattgattacagattattcctggccttctcccctttcccttttccctcttctcagccttttagattttttttttacttttcctgtctttgaagcttcctttcaatgtgccctggatcttaaggatttgtgtattgagatataaatacagggaactaaagaagtcctcaaaacaggttattaaaatggaatgaagatatatatgatatatataaaaagttctcaaagtcacttgtaatataaattgtccctttgtccaaaccaccacctgccctattttagccctacctcatcacagaatctttgacgaatagtcggttttaaaatacaggattctgtcaataaattacttataggaatatgttcactctgtttttggcaaaactagaaggtgtttgaaaacacggaaatgaatccaaaaccaattaccgttatgtcatcaatataggattcgtggtaatatgtgctaaatgctttattctgccgtgtaatagcatacgagaaagggctgtgggtcatgcgcattttttaagttgttgtatgcaggtcctgtgaattttaagtcagtttttggcctttgtgcatagttgaagataagatacttgcttggtttaatttgttttttaaagttaatggtgaatggttgagcctggaaagtgtcaggtttaccttagtaaaagaaatttattagctatgctgattagctctaattaagtttaaatgtgcgcagacagttttatccaaagtctctgttgtgtttgtagttttaaactcagaatatattttctcatggaaatgaaattacaatgttggttaaggtcttagactgccttataaaactcactcaatgcataatgtagcaggattttagaacttttggcaatcagatatgcttcctggcttctgaatttttggcaggaagtgtgagattgagactccggaagtggcagtggtaacaggttgttaaggcagtggaggaagtgtccccaggttccaagcatgacagaagctgtggccctttaaatatgtgggttctaaacctggttggttgcctgtattatatattccagcccatttttctttgagcctcacttcatgtattaaagctctactttcccagtaaatcacaggctgcattataatattttagtttttctttattccttcacgtagtcattgtgcatgagcaattctaagtttcaattgtgaaagctaattataatgtgaaactgaaatctctgtgttcttgaagaagcttggaatatattgacagttttttctttgagaattactttaatttcttttatctttgttcagtatcttaagcttttaaaataaggactaattttcagaagagctgttcttctttcccgtaatgtcagaatctcacatagtgataacaggctaaattttcactgagggttgaaaagcaattcttctccttttttaatggcaacactgtcaaactcgtggtagaatgatacaaataattcttgtgggctgtaaccattactatcctacacatgtaatttcaggtgtattcagtctttatgcgagcttgaattctaggcagctgatctgatagtttgcacatgccaagattttaaagtttattatatttttattgaaagttctcatgtatccagttggtttaaaaaatgatgttttaaaatgtgaattcctgcagagctgaattctatgctgttgaatgcccatactctacatagaaatggtaacgtttccaagggatgaaaaataggctgaattactctaaattaaaggtttcctggttttttatctctggcatgtttcttccatccaacaaaatggtggtagagagtttcttctgaagctataaactttaaatttcctttaccttttttttccccaaacttgcctctatgtaaggctatttcgataatgctgtggtcagctcttgagagtacaagatttctttgctgtaaagagaaacaatactgggatgtggatgctatataaaggaagctttggcttagttcaacagtgatctcatagctacagtttttgtgtggcttattccgactataatttttggctgtgctctggatgtcataacattaatttcaggttgaaatggctgtcgaaattcagatttggcatttcttttctctagattttgcccagcacatctttgtccttgtaggaaggatactcctctattgttattctgcctttttataatcttcctatttttgaggtgttggaacattagtcttcaaggccttcttgggagagattgaactggatgggtggttggattaacttatattgattttcaggcaagaagcctgtgacgctagcttgccttacagagtgggacaaaggggaggaccagcagtgtgcccagtctagtgaagcatacttttttttttttctggtcacaggaagtagttagggattttggacatcttggctgtaggtgatgaaatccgatttgtttcctctgataaaagggcagtgaaggcaagaagtatgataaagtgtatcatggagagtggttgttaactaaagaattcaggcatggtggtctgagttgatcataggtcactcaggactcctgctttgactcagtagaaagtagccaacgtgttgaagaaatattttttttagtgaaaaagtagtgggtattttatttaatataattacagatatagcagaatatcttggcatttgtcactgaatctttttaataagcctcttgcagaacagttaagagaatgtgaaaagcaacaaactgttgaaatataatactaataaaagccatcacaatcgctgcaattgtatgtagagatgtattattaaagtaaaagacttaaaagaagtttcatgtaaggctggagatttttcagtgatttcaggatttgaaatgaagtcttatttttaaaatgtgaaatttcatgataatatacaggggaagaaaagtagctttcctctgctactacgtgctacatatagaggaataaatgaaatttgctataaaaatatttttatttggaacctccagtgagtatttatatatatttgtgtagaatccattttacatttgttacacatttaactaaggaacacagaaatgaaacttaaatttcaggaggataaattattttaatagaatgccataaccacaagggtaaatactagcttaccattttttatagtcagaattttcattactacacagtatcacttaaagaaagagccttgcataaatttaatttgttgtttattaacaaatccagaagcatgaactcgttcaacttattgaggaaagagaatctgagtagttacctgtttctcaaatttgatgatgtttatttaggaatatcatgctgatattcagtatatacaaatgtgtatgtttttggaattactttagaactatttcctttatagtaagttaaaatggaataatctcatgcttgaaaaatgaactttgaaattaaagtcttttttctttaaatttttattagaattgaaattttgtattgcaatttgcataacgctgattaggaggggttggagatgaaaatgtaaattggattttcaatcaaagactggtacgacttgattttttttctccctgagcttacaagtttgacctatgaaaacgtgggaagtaaagaatatattagtttaagaaaacttgcagaggagaaaatagcgtattttaaaactccatattgtaatatgatttttgtatagtataattttgaaataaatgtgaagctaatgtagctgtttgtatttttgaagagggggcatatttttggatatgtccaaaactaactgtaagcaagtaatttgatatctttcttgaaagataaaggtgatgatgttaactgtgtatagtttcaggtagctttattactggtagcaggaaattagctgtttgtgaaaatagcgtgaaatcgaattcagaacagctgtctaatttatcagccagaacaaactgctcatgttttaaagtatatcagttactctaggtacccattattgacctgttcaatctactaataatgtttgctcaaatctagagaaagtttgcaaatctttttaaaaaaacaaataaacctcttacttcttttgagtgttctttcatttattttggatttgtatccacttactattttaaaacaaaattctcaaaagactttttgaggcattttgctataacagggcagagaaatgatggggtagcctgaggaggaattgtgtgtgtgtgtgtgtgtgtgtgtgtgtgtgtgtgtgttttaaagcatggagaattaacagcattatatgtgctccagcagaaagggaattaatttataatgtaggagaaaagagggaagaactacggaaattattgtcagttcctagtgcaagtggatggggtccaaggcacaaaaggatgagttgggcgttaggagcatacattatttatttgtgtaggaaggggcacagggtgtatgagcagagagatgatggtacttggatatgtgtgtttgtatgaatttatggaagttttctgattggttccgttttatcactgaggaggagtataaggttataaggtgggtgagaatggggaaaagaggtttgaggtgagagaagatgtgtaataaatagtctagaagagagtagcagactatagaccctgtgtgcacccatgttgcagctgattcacatttggccatctctctgtccctgagttgcacatcagcaactttttgacattgttttcatttggtttgaggttggttatttttatccatctccatgaaatttaatctctgtgtgtaattctttttaaaaaatttccaacttttaagttcatctgcatataattctgatgtatttataatgtctctttgttccataactttgctgttgtcaaaattggaaaaaagatgtttcagtcagtatcctcccaagtatttggtccaagtaatctgggtaagttaggcacagatctgacttgctgtgatattaactggcacttttcttctgattctgggtggactcgtactctccagtaaaggcctctttttagttgtgcagaagcggtttaagtgacacagagacttcttgggggcttcttcatagatctgtgatcaaactggctagccatcaaaaactgggtgaataaagcagaatggaaagaaatacaagtcctcggtatcataattaaaacactgcatgagcattctcttgcttttaggaggaagcaataaaaggcttacaatttctatatatttaccttaaattgaatgccccttctaaactgaggatttattagcttttttttataattggaagtatttatattctgaggaaatgtgacattttgtggtcatttactgtaaaaatttatttgctatgccaacaccctagaaaaattatgaagtactagagaattaaaactgcagtatgcaaaaagtgctgttttactgatgaaaagagagatcttctgttttaaatgagacatttttgtaaaatagttcattgtaattgagtttcagtgaaccatggcgctaatagaaatcttttatgatatgttgcttattgtatataaaaaaatgaaatcttttatgaaagtggtggcttcatggaatattgtggcttggatcttacttgttttagttaagaagcatttgttgatcacctgctgagtgcaaagccctatagacaatgctgtaggagagatagaaaggaaatagaagaccagatttctgccactgaggtttgaggtagagatgataccaaaatttgatctttaccagaaccaaatgtagtctgttacccctatttttaaatccatggagttagagtactcaaatttagcttcttactctacggtgattataaaattatgctatgttagtggttaggtagggttggagaagagatgtcacatctgcatgtaacaggttataaaatcactatgcctaaccagttttaattaatggattacacagtaattaccacatgaatacattttaaatttacagaatacctaatcagtttaggagttttattttcttggggggagatgtggtcaactaagaaaactttattctcaaactagtatttttatatgtgctttgtgggttttgtagtttcttagacttgttcttaaaataattagttatcctttttattgatgccttttaaagactataattccattcttgacaaaaatataaaattcaagtgttgaattttgtgttttttacttatttgcaagtgaattttattattgccgtaagaaaattgttgagtacttgaatcaagataatgtatacttacagagtgaatataatctgtaaaatttgttttaaaatggtattttgaatattgtatcatttaggatgacaaagtgttaaaataaggatggttttagtagcattttaatatttcatgaaaatgagtaacaaaatgagtaaaataggacattaattaactattatctgatttaataattactaggaaaattgagtgaaggttaattggattaggatagcaattgatataatttggctgtgtctccacccaaatctcatctagaattatagctcccataattcccacgtgtcatgggagggacacagtgggaggtaattgaatcatggtggcagttcccccatactgttcttgtggtagtgaataaatctcacaagatctgatggttttataaaggggagttctcctgcacaagccctcttgcctgccaccatgtgagacgtgactttgttcctccttgccttccaccatgatagtgaggcctccccagccatgtggaactgtgagttcattaaaccatttttctttgtaaattacccagtcttgtatatgtctttatcagcagcatgaaaacagactcatacagcattgttttaatatttaactgcttattggatacacctgtgctaactagaaaacagcccttagaaagacactatcaaattttagagaaagatttatttcaatgtgaggttttaaatattttgtgtgtgacaaatatatcttcttttaaattaacttgtttgtttaaatgagaatcaaatactctctctgtttatatgcttttgaggataagggatatactggtatctaagttttaccttatacactttgagccctggtgtggaggcctgtgataaatgttttagcaaacagacccccacagccattgcctggaggtttacattatttgaaaattctggcaatacttaccattcagtcaatcagtcaacagtatttgaatatttactgttggtcccaaaccctcttaggcattgtaagtgttacagaaatgtcaccactatttggcacgtatttctataataccctgtttttgaaggatggtgccaagttggcaatgtatatcctgaaataagtaactataacaagctagttgtgatgaggtttgttattttgtgtaactgtagtagttatcttttggttagtgttttcctattacatatttgtttctaattttatgcttttagatttattgggtccttatattttagctatctgtcttgtaaacaacatatagctggattttaattttacattcagtctgataatctgtctttaaactggagattttgctttgttttttgaccgtgattactggtaaatttatattcatttctctgattttatttaacataaaagtttgtatctgttagtctcttctggctgccgtaaccaaactccataaactgggtagcttgtaaatgacaaaactttctttctcacagttctggagtctgggaagtccaagatcaaggtgttggcaaatttgatgtttggtgaagacctactttctgcttcacagatggtgctttccagctgtgttttcaaaggatggaaagtgcgaacaaactcccttgggcctattttataagtgaactaattccatttttgagggctctgcccttatgacttaatcacctctgcaaaggccccacctgctaatactatcatgctgatgattaggtttcaacatagtaattttagggaagattcattcagaccatagcagtgttgatgtgttttttatctttttattttaaaataagtacagatttacaggaagttgcagagaaaatatacagagaggtctcttgtatgccccacccagtttaccatgatggcaacatcttgtgtaaatacagtacaattgcaaaagtaggaaattgacattggtactattcacatagcttattcagatttcccgttttacatgcatacatttggggtgcgtgcgcgtttgtgtgtgtgtttaattctatgcagttttatcttgtgtatatttgtgtaagtacctcatcaagatacatccaccagactcccttatgttacccctttatagcttcacatactcttctcttttccccctccatccctaatccctgacatcctcttatccgttctctatctttataattttattttaagaattttatataaatggaaccaactgtttgtaaccttttgagattatctttattcattcagcataattctcttggtatccattcaagttgttcagcctatcaatagttcattccttttattcttgagcagtgttccatggtagaaatgcactattatttgtttaaccattggccctttaatggatggatttgggtcatttccagtttttgggtgtcacgagtaaagctgctgtcaacattcacataccggtttctctgagataaatgcccaggagtgcaattgctgggttatatggtagatgcatgtttagtttttttaagaaactgccatactgatttccagagtggctattctcaccctcactcactgatgtatgagtgatgcagtttttctttaccctctgaatcacttgatatcatcactggtttttttttttttttttttttgagacagttttgcttttgttgcccaggctggagtgcagtggtgcgatctcggctcaccacaacctctgcctcccgggttcaagcaattttcctgccttaggctcctgagtagctgggattataggcatgcaccaccacgcccggcgaattttgtatttttagtagagacagggtttctccatgttggtcaggctggtcttgaacttctgatctcaggtgatccacccgcctcggactcccaaagtgctgggattacaggtgtgagccactgcacctggccatcattactatttttattcaaacctttttgataggtctataatgataacatattgtggtttaatttgcattaccctagtagctaatgaagaacatcttttcatgtttatttgccatccatgtattctctgctgaaatgttttttatggtttttgtgcatttctaattggattattcatttttttactgttgaattttgagagttttttctatattctaggtgcaagtcttttgtcaggtatgtggttttcaaatattttctcccagtccatgcctgtgtttttatcctccttaacaggatattttgcagaacaaaagtttttattttgacaaagtccagtttacaatttttactgtaatgtaatgtcctttggtgtgaagtgtgattttttttttttttttaaaacctcctctctcaactttcctttctaggcactttgttgttatattttatttgttattttcttgtttcattttctttttctttactttttcaaactttactgtttgaaaagttacatattgcatgtgtacattcttttcagccttataaaatttcttgcttggatgtttgatttgaagtataaagttaatcactgtattagtgtgttctcacacagctatgaagaaatacctgagactgggtaatttataaaggaaagaggtttaattgactcacacttctgcattgttggggaggcctcaggaaacttacaatgatggtggaaggtaaagaagcaggtaccttcttcacagcgtggcaggatggagtgagtgcaaacgggaaatgccagatgcttatacaacatcagatctcatgagaactcactactataaaaagtacagcatgggagaaactgcccacatgatccaattctccctttacctggtcctgccctcgacacgtggagattgtggggattacaatttgaggtgagatctgaatggggacatagagccaaaccatatcaatcactatatttacctttcttctaaacaaagtatgggatctcagaatgctttgactcttatatcttcttttcagacttaggctactcttagttaccactttggttactatagctatcactgtaattattttataagtgttttatttagatttatcttatttgatttattcatgtttacttttttcctctctatactttgtttttcagacctttcttctagaattttttttcttatccatgaagtatacacattttagaatattctttgtaagaggtttattcagtcaaaaaatgctttcattgtctgtaaatatatttgttttgttcattttaggtatcaaagtatggacactttatagtattccactgtcatctggattcccatgttgctgcagagtaaattgtcagtctgattgtcatttcttactacaatgtcttttctctatggctttaaaaaacacacacacaaagaaattcctcccagaatgactgatagataaggaaaaagaagccaagtgtttatcttgccattcttgtataaactaaacatcagggtaaacaaatgattattatgaggcagtttttccttacccacatactccaggtaataaatgtggtagtcactcatgatagaattcgaatctcactagccccttgtgagtaatgttagaattaatgagtaaaagtagcattcgaatttcttttcaagttctgggatacatgtgcaggatgtgcaggtttgttacataagaaaacatgtgccatggtgatttgctgcacctgtcaacccatcacctaggtattaagcccagcctgcattagctatttttcccgatgctctacctccccttgccaccacccctgacaggcccctgcttgtgtccatgtgttctcattgttcaactcctacttataagtgagaacatgcagtgtttggttttctgttcctgcattactttgctgaggatagtggtttccagctccatccatgtctctgcaaacgacatgatctcattcctttttgtgactgcatagtattccatggtgtatatgtgctacattttctttatccactctattcttgacaggcatttgggttgattctatgtctgctattgtgaatagtgctgcagtgaacatgtgtgtgcatttatcttcataacagaatgatttatattcctttgggtttatacccagtaataggattgctgagccaaatagtatttctggttttaggtcttcgaggaattgccacactgtcttccacaatagttgaactaatttacattcccaccagtagtgtaaaagtattcctatttattcacagcctagccaaaatttgttgtttcttgactttttaataatgcattttgactggtgcgagatggatctcgctgtggttttgatttgcatttctctaatgatcagtgatgctgagcttttttccatacattttttggccgcataaatgcctttttctgagtagtctgttcatcttctttgcccactttttaatggggttgtttgttttattcttgtaaatttaagttccttgtagattctggatattagacctttgtgagatggatagagtgtaagaattttctcccattctgtaggttgtctgttcactctgatgatagtttcttttgctgtgcagctctttagtttaattagatcccatttgtcaaattttgctcttgttgcaatttcttttgacattttcatcatgaaatctttgcccatgcatgtgtcgtgaatggtattgcctagattttcttctagggtttttatagttttggtttttacatttaagtctttaatctatcttgagttaatttttgtataaagtataagaacagggtccagtttcaattttctgcatatggctagccagttatgccagcatcatttattaaatgggggattctttccccattgcttgtttttgtcaggtttgtcaaagatcagatggttgtagatgtacagtcttatttctgagatctctattctgttccattggtctatgtttctgtttttgtaccagtgtcatgctgtttttgttactgtagccttgtattattgtttgaagctgggtagcatgatgcctccagctttgttctttttgtttaggattatcttggttgtatgagctcttttttggttccacgtgaattctaaagtaggttttttctaattctgtgaagaatgtcaatgctagtttaatgggcatagcattgaatctatagatactttgggcagaatggccattttcacagtattgactctttttatccatgagcatggaatgtttttccatctgtttgtgtcctctcttatttcctcaagcagtggtttgtagttctccttgaagaggtccttcacttcccttgctagctgtattcctgggtattttattctctttgtagaaattgtgaatgggagttcattcatgatttggctactattagcgtataggaatgcctgtgatttttgcacattgattttgtatcctgagactttgctgaagttgcttatcagctcaagaagctttcaggatgggtcgatggggttttctagatacaggaacatgtcatctgcagagacagtttgacgtcatctctttgtcttgaatactctttatttctttctcttgcctgattgccctggctagaagttccaatactctgttgaataggagtggtgagagagggtatccttgtcttatgacagttttcaaggggaatgcttccagcttttgcccatttagtatgatattagctgtgggtttgtcataaatggctcttactattttgagctatgttccatcaatacctagtttattgagagttttttaacatgaaggaagtttaattttatcttaggccttttctgcatctattgagataattgtgtggcttttgtctttagttctgtttatgtaatgaattgcatttactgatttgcatatgtttaaccagccttgtatcctggggatgaagctgacttgattgtggttgataagctttttgatgtgctgctagatttggtttgccagtattttgttgaggatttttgcatcgatattcatcagggatattggcatgaagctttcttttgttggttgtatctttgccaggttttggtagcaggatgttgctggcctcataaaatgaattagggaggagtcccgccttttcaattgtttggaataatttcagaagaaattgtaccagcccctctttgtacctccggcagatttttagctgtaaatatatctgtttctgggcatttttggttggtatgctatttattacagcctcaatttcagaacctgatattggactattcagggattcaacttcttcctggttcagtcttgggagggtgtatatgtttaggaatttatccatttcttctatattttctagtttgtttgcatagaggtgtttatagtattttctgatggttgtttgtatttctgtggggtcagtggcgatagtggctttatcctgtatcatgttttattgtctctacttgattcctctctcttttcttattagtctagctagactattaataaaatagtcctattttatattaattttttcaaaaaaccagcttctggatttgtgtttttttttttcttttgagacagtgtctcgctctgtcgcccaggctggagtgcagtggcacgatctcagctcactgcaacctctgcctcttgggttcaagcgattcttctgcctcagcctcccaagcagccaggattacaggcatgcaccatcatgcctggctaatttttatatttttgtagagatggggtttcaccatgttggccaggctggtctcaaactcgtgacctcaagtaatctgcccgcctcagactcccaaagtgctgggattacaggcatgagccacagcacccggctgatttgttgatttttttgaaggattttcatgtctctgactcattcaattctgctctgatgttggttatttcttgtcttctggtagctgtggggtttgtttgctcttggttctctagttctttttgttatgatgataggatgttgacttgagatctttctagctttttgatgtcagcatttagtgctataaatttctctcttaacaccgttttggctgcatcccagagaatctggcacatttgtctctttgttctcattggtgtctaagaacttcttgatttctgccataatttcattatttacccaggagccaatcaggagcaagttgttcgctttccatgtagttgtgtggttttgagtgagtttcttaatcttgagttctaatttgattgcattgtgatctgagagactgttattgtttcagttcttttgcatttgccgaggagtgttttactaccggttatgtgatcaattttagagtaaatgccatgtggcaatgaggagaatgtatattctgtttttttgggttgagagttctgtagatgtctatcaggttcacttgatccagagctgagtacaggtcctgaatatttttgttaactttctgtttggatgatctgtctaatattgtcagtggggtgttaaagtctcccactattattgtgtcgaagtctctttgtaggtctctaagagtttactttatgaatcctggtcctcctgtattgggtgcatatatatttaggatagttagctcttgttgaattgaaccctgtaccattatgtagtgcccttcattgtctttttaagtcttttttggtttaaagtgccttttgtcagaaagtactattgcgacttctgcttttttcttgtttccatttgcttggtaaatgtctctcttgaaggcagcataccaatgggtcttgattcattatccaacttgccattctctgtcttttaattgggggatttagcccacttacgtttaaggttaacagtgttatatttgaatttgatcccatcatcatgatgctagctggttattttgcagacttgttgaggtagttgtttcacagtgtcattggtctttgtacttcagtgtgtttttgtagtggctggtaatggtttctcctttgcatatttaatatcttccttcaggagctcttgcaagacaggcctggtggagatggatttcctcagcatttgcttgtctgaaaagggttttatttctcattcacttatgaagcttagtttggccagatgtgaaattctggattggaaattcttttgtttaagaatgttgaatattggcccccaatctcttctggcttgtagggtttctgctgagaggtccactattagtctgatgggcttccctttgtaggtgacctagccattctctctggctgcccttagcactttttccttcattttggccttggagaatctgatgattatgtgttaggggttgatcttctcatggagtatcttattggggttctctggatatcctgaatttggatgttggtctgtcttgctaggttggggaagttctcctcaatgatatcctgaagtatgctttccaatttggtcccgttccccctgtctttttcaggtaccccaagcagttgtaggattggtctttttttttttttttttttttttgagacggagtcttggtctgtcaccaggctggagtgcagcggtgcaatcttggctcactgcaacctccacctcctgggttcaagtgattctcctgcttcagcctcctgagtagtagctgggactacaggcacccaccaccacgcccggctaattttttgtatttttagtagagatggggtttcaccatgttggccaggatggtcttgatctcttgaccttgtggtcgacctgccttggcctcccaaagtgctgcgattacaggcgtgaaccactgaggattggtctttttacataatcccgtagttctcggagcttttattcattcctatttattattttttctctaatttagtctgctttatttcagcaagatagtctttaagctctgaaattttctcctctactttgtctattttgctattgatacttgtggttgcattgtggagttctcatgttgtgttcctcggctccatcaggtcatttatgttcctccctgaatggcttattctggttaatagtgttttatcatgattcttagcttctttgcattgggtttgaacatgcttctttagttcagtgaagtttgttattacccaccttctgaagcctacctctgtcagttcatccatctcagcctcagcccagttctgtgcccttgctggagaggtgttgcagtcatttgtgggagaagaggcactctggctttttgagttttcagcattgttttccttaattctttctcatctttgtgactttatctacctttggtctttgaggctactgacctttggatggagtttttgtggggacttttttgtgatgatgttcttgtttttgctttctctttgtttttcttttaacatgcccctcttttgtagggctgctgaggtttgctggagttccactccagaccctatttgcctgggtcctatctgcacctggaggtgtcactattgaaggctgcagaacagcaaagatagctgccttctccttcctctgggatctctgtcccagaggggcaccgacctgatgccagtgggaatgctcctgtacaaagtgtctggcgaccgctgttggaggttctcacccagtcaggaggcatgggatcaaggacctgtgtaacaaagcactctggctgccctttggtggagagggtgcgctgctctgggggaatcccacttgtccggactgcccagattcctcagcaccagcagggaaagactaagtctgctgatccatggagatcatggctgacccttccctgacaggctctgtactaaggatatcagagttctgttcacatatccatggctggagttgctgagattgttgcagagaggccctgcctggtgaggagtgatgggtccaaatttggcctgaagaggcagtctggccatgatctgccacacccgctgtgctgcactgtggggaattccttgtgggtccaaaccgtccagtctccctggcaccggcaggagaaaacggcagactggagctgcagtgatggttgttgcctcccctccgcccaggagctcagttgtcttaggcagcaggcatctgcagtgatggtggcctcccctttcccctcaggacctcggtagtcttaggcagtcttaggcagccactgagaatctgcacagatccgtctgcacagatccgtggaaaatgcatggtttcccaagtggggcagcacaatcacttcccaccttccttagctaagggtgggagctccctgtgccctgtgcagttcctgggtgggctgtcgctgcacccagctctgtagttcattccaactgtctagtcagttccaatgggagaacctggatacctcagttgccggtgcaggattcactcatcgttttcattcttgataggagccttccaccgcagctgtttctactcggccatcttggcccctccctctagaattagaattttaaccgctaacagaatgatagatgtctagattataatcataacaaaaatagacaaccagacttttgcctcctgacagaagtactcagcctgacttaggaaataagcctgagtctgattaagcctttagatttaactgaatatgtgtcatggtctaaataagggacagaaaccatacagttatttggaaatggaaagtttcatctaaagaatggtcactaggggagtggagtaggtggattaactaataagaggcaaagatgtataggaatagcagatacatggagagcagtcaccaccaccagcatggaagaaagtgtccaaggaagagaccacccactctcagggctgagagcctagcctgggtggaggctgtgcagctgtggcttactgctgggggtagttggccgaggttctgtgctgcctggaaacccatgctcaggagtactgtggaaggtattcacaggaagatgcaatgacttggaatttactgagtcagcctattctctgggatgggtgggtgacagaggatttgttcaaatggaggtgcttacctggtggcacccttcttcaaagacacctgatggtgggtgtcggtggaaaaccacctatcaatccctactcactgccactctgctgcacagccattgggggctccagggaggtcgtctaaaggcaggtggcagctcctgtgctctattgcaaaacctcctggggatggggttgagttgggggaggctggtgatggtgaagtgccctgctattggcactggttgtggaagctcccaagagggatacactggccgtgtgtgtgtgtgtgtgtgtgtgtgtgtgtgtgtgtgacgtccatgggaaggtgctggttgatgctggcttttcagctcggctgtaaggaactgtatgccatgctgaagcccagagagacaaatacactagaaccagaaagagaagctcttccttctgcttgtctttccactgccttctagtgacaaagccttgtactgggatagctcatcagaggagaaatatttccaagttcaaccccactcttgcagagctggctaggaagaatggatttatatctggaggcaaaaaattgacaacagacacaaactactagcttataagaaattcagggagtagaggaagatatcaaatgatatcattagataaaatcagcaaaatatagtatgtgggataaacaacctagttccttcaacagataaacatcaaggaaaacaacacaaagaaatggaagagaaatctggattaaaagagatttaagagacatatgtgtgggccttctttggattctcatttcaatgaatgaagtataaaaatttttttgtatgtgacaggaaatttgaacattctggatgtttgatattaagcaattattgttcatttttgatgtggtaatagtgtgtctattttttttctaagaactcctttggtaatacatgctgaaatatttacagatgaaatgatacaatgtcttggattttagtaatatgtttattgcctttgtgttgaaaaaactcaaaaaatgtgaaaatcgttttttcttacagggtttaaaagttactactatacaatagcctctacctcagttttgtacagaaatcaatcatgaatgatgacctgtctttaaaataacataattttgaatcttgttcctgagttttgtttataatgaactgttagaaatttatgacaatgataactggcatttactaagacatattattccatggctgtgttcacgcacatattctgacttggtagtttatgatgtgaacaaaagtgtctgtgctttgtgggatagttaatattgtcttatggaaggaaagaaaatcaactatcattttcagcagtcttgttgacatagacatatgttttctacccgcaagcctgaatatgtattcttctgacatgtttactatttctagaaaccatggtattcttaaacatttcagaaatgcaactgctattatatttatcctctgctgatatagtgtttatagcatatactagaattttagattttgagaaaagttcatattaaaacaactacaaattcccaagagacaatattttaggtatcggtgcattttttagtccatgaaaatgtttgaaataagtcttttgtaatttactaatgttcttcagctcttaatgataatttcactcttgtttgtttcatagctgaaaataaaatattagaaatttataaagttcaaatagcatgatataaataataaaattaggtatttacaaatattggtgatatttgtgggtagggggaagggctgagtagaggagaagaggatgcattattaagtttaagatttttcgccaggcgtggtggctcacgcctgtaatcacagcactttgggaggccgaggcaggaagatcatgaggtcaggagtttgagaccagcctgaccaacatggtgaaaccccatctctactaaaaatagaaaaattagctgggcacggtggtgcgtgcctgtaatcctagctactcgggaggctgaggcaggagaatgacttgaacctgggaggcagaggttgcagtgagctgagatcgtgccactgcactccagcctgggtgacagagtgagactccatctaaaaaaaaaaaaataaaagatttttcttaactttttcaggggtttcataaatggttacttgcagctcattcttatgcctaaaaatatgataaaatactctcgtgtgtatatgtgatgctataaatgtcaagaacagggaatcgcttcagattttacccctcttgcaaactaataagtcagccacaatttcatggatactggtggaagacatgagactcctgagtcagagatgaaggacaatttcttacagcagtggcagcagcattttgggccagttttctggatcttgcttcccataggatgatgggaagacagtcagatgacacctagggctgcctgagacaatcccagagcttatgactcttgaatttttcataatgttaagtaaatgccctggaaggagacattatctttagtaagcatggctgccttttcctccagagctgacactgtctctgtcctctaagctatccttgaaaagatgatctggaacaaaaatgggcagtacctcacaagacatacagaaacatgagagacccatagagaactacttctcaacaccatctgcacttactcctgtgctgtcctggcttctgaagaattttaacctgaataccccactctgtcagccactctgattaattggattgacagagactcagaccagactgttcaacttgtctcatatgaaatttaaccaagggcattatcagtaatagtccaagcagcagaatgaggccaacctgagatagaacactaggaataattttagtcagtagaaatataatgtacatcaagtcaaatattggccaaagctgtgagagtggctttgggctttgcctccctgtgcagaaacaccacggctattttcatttctgcacagttgagcactgagattgtacagctttagcagtccagtgaacattgagtttcaacttagctgaaccatcaatgaaccaagcccaggcaacccatggccgcatgagccaatgactttgcttcaggtgccagagttggggccggcggggaaggggggatagttttccccagagggatagctgccacttttttaaggtaaagttgagatgccactgggagtaggctagctggtccttgaaggtatcatttctatttgataagctaggcttattgggtcctacccaccttgatatttatagagtccttcaatgggactatcaggcaagtgagtcacaaggcctctgtgggttaggtggagagtttaaacaagagccaagcagcaagctcatagctgctttttaaaagggatgtacctggcagccacatcagggaggtgatgagcccagaaccccaaaggttgctgctggttggagatcatctcccttcactccatacttagattcccaactcatcgtagagactcgtcgtgagtctgtggagtgccagaggttgagagtgtgccacagcttgctggttggtttccaatggggactctgggctatgctccaaggttgctggtttgcaaactaaccaaagtaaagcaccaagtagaatgccaaggtgaggtacatactgtttcctgtacccaaagagactaataagacagcagaattccttaactgccagaggaattgagcagaaaactgtcttcatagtcccaagaacttttacttgggaagattcttgtacactgtgagagtttctcagcctccttttcaggcagaggtatggtaacaccacagtcaggactgttgaaagtgaggcttctgacttgtttaccaacgggctctcctctgtagtgaaaactttagatgtcacaaggcacgaaatcctgactctactccctcttggcatatagccccaaagagtgtagcttcccgtttggaagtacctggaggccttgcatgtaaatgaaaatggattttggtcctcaggtacctgtgggatgaaaaacaaggtgttggtaatgcccaggacctcagacttagtgccagcagcctgtgcagtggtttcagttacagttgcagtggctagaatagctgggactctagcagcaacaactgaattcaggtgatcagcattcactgtaagcctccaactcctgttagtctttttcactggccagatgtggccgttggttgtattgagatgttgcttctctttactacccctgctgcctttaagtccttattcaagattgtgattacccttctcctgggattctattttgcttctcttggaccacaggtagggagaagggttgagaaacaatctatattttcaactagcactttatatatcactcttcctcatctgggtgatcccctccggctcttatgggacagggaagtacaggcatttaatgcttcttactacatactcggaggtagaagacaccacaacagtgtatagaagagttccctgtgaagtcagctcctctttgctctagggggagtccctgctgttttccttttttactcactgtgcctttttggtcttctctaactccttttaccttatcgtaattccaattattgagtggagagttaacactgaaacttaccagtttgtcaaatatgattgaacgttgataaggtagtagttacctaggcacggagactacagtgttgaacaaaacgggtaaaaagttcctaccccatgggtttacatactctatgctagacattgcgctaaactgtccatatgacttaatccccatgatggcttaatgagagtgacattttcttcccgctcccactggagctctgacatcccatggtcagccaaccccacccccttcacccttgattggctctgacacctcactgtgggcctgggtggctccctcctcacccttcaacacacgtacacacacacacgcacacctgcacttgcattgctctggcacacctgaattgtttgagagggaaaaatgggcactaagtatatttatacggtttggatctgtgtccctggcgaaatcccaagtggaattgtaatccccagtgttgaaggtgaagcctggtgggaggtgactggatcatgggggcagatttcccccttggtgctgttctcctgatagtaagttctgagatctggtcatttaaaagtgtgtggcaccttccctgccacttcttcctgctctggccgtgtaaagtgctggctttcccttctccttctgccacgattgttaagtttcctgaggcctccctagaagccaagcagatgccaccatacttcctgtacagccgtagaatttgagccaatgaaacctcttttctttataaattacccagtctcaggtatttctttatagcaatgcaggtgctaatacatatatatttcttaaagaaaaagttacttcttacatttgtatgtacatttggtgtacatgaactttttttttttccaggagattactcataatgttcctaagaaatcagtgacttgctgggcgtggtggctcacgcctgtaatcccagcactttgggagaccgaggtgggtggatcacctgaggtcaggagtttgagaccagcctggccaacatggtgaaaccctgtctctactaaaaatacaaaaattagccgggtgtggtggcaggtacctgtaatcccagctactcaggaggctgaggcaggagaatcgcttgaacccgggaggcagaagttgcagtgagccgagatcgtgccattgcactccagcctgggggacaagagcaagacttcgtctcataaaaaaaaaagcagtaactcagaaacattctctggagaacacaaccaagttgaagccatgtaggtggttcctcttagtgcaaaagagccttctttcccctctactaattaaggagctaagtcataaaggagctaactctatatccatacagattcttccattaagaaaatctcaaatacaggcctcatgattagaaattaatacattttataagacccatgaatttttattgctaacagtggggtatttgagaaattatctaaaaaagattctggctgtgatacaggtatatggcattttccccttgtctgtaatccttttaaataaagacagagtgaatcaattttataattaattttatgcagatattctaatttattaaaaatggttggtggtagttatacattgagaaatgggtaggagttatttatctcattagattaataccaatttttatgaacagttttgggatagattggctaaatgactttggcgctgaagctatgccagtttgaggtttattcttacgcctttatttctcttccacaaccttgtgttaatggtctgtctcccacgaaactctgggctgttggagggcaggtagaatatttctattttcagtgcccttatgccgagctcataaaaatgccaagcatgctaaaacatgttgaataaacagatggatgagaaaattgaagtctatgagaaaattgaggactgacttttaaaaagctacagttgtatactgaacgtttcttatttgttgagtcctgcagacagatctgtcatacagctcttacagagcagaggttcaactactggcagaactggaactcaggtccagttttacatctgtgtctactctttgctctttaatggagaagaaatgagaaaattctagagagttgtaatggctgaatccgtgatattatttcgtggttagactcagtccatttggacttgtgagattttcccatttggtagccaaagataaggactaggtctgtgatttcttttcttttcttttcttttctttttaagatagaatttcgctctttttgcccaggctggagtgcagtggtgcaatctcagctcactgcaccctccaccctccgggtttaagcgattctcctgcctcagcctcccaagtagctgggattacaggcatgcaccaccaggcccggctaattttgtatgtttagtagagatggggtttttccatgttggtcaggctggtctcaaactcccgacttcaggtaatccgcctgcctcggcctcccaaagttctgggattacaggcatgagccagtgcacccggctgtgatttcttttatattgctttttggcccctaaaacaggtgtttatcaagttctgtttctccgctttctctccctgccctgccctgccccatggtactaagaaagagtatatttaatccagagatgggcctgtggatagtttttcttcctgttccataattgacatgtcacttgccattcagcctaatcacaaggtgtctaatcctactcctccttatatggtatattccccaaaatttattcagatccatttgagcttgtgttatatatagttttatcaaaatcttttgtagataattctccagtttttttaagtcagtgcccttgctgaaatttctgaccgcaaacttttttgttttctcatatgcttgattcttattctactattctctttgctcctccctctgtcaaaagttgtacagaaaaaggagaaagtccttgcatgtataaccttagcactatatcagccttttaaagtatttgctttcttactagagaccatttttactttgttttgacaacttaaagttcttatagctctaccttatttttgtttgatgcaaatacaaacacacacgtttgaagaaaatcaagttggacatcaagctttatattgatgtgttttgtttattgttgatttatattgataaagtgtgcatgaagattaatttgtcatgcacatggtatagaatagtatataaattaactataatatgaaattaactaaatagtatataaattataatagtatgtaaattaactacagtaattacaattaccaacagtgagggcctgctccatagcctatgcaagtaaaattatttttttgttttccattgaaacctttcggcatttgtaggggttcccaagcactaagtcatatgtttgtgtgaagtaatctttatctgctgtgcattctttccattttatttatttattttttaatttaaatatacagtctctcataaaatgtcaacacatctaagagtttagaaatgactcgttttttccagtttatatggaaaaatattaaaaagatatacttttctgttgaacattttttaccttagatattatagattaaatatttttttaaaagggaagtcatctacatatgcagaatttcaaagcaaaccaataattgttttcaattgatatttattgagcttctacttagtactccattttttgtaaggctcttaaaaagaagcacgatgcttctgttcttgagatactctcttgctctttctctttttccatggattcttagagacacatttttctgtcatattttaagcttcctacaattggatggcaccttgcaatcactgtcagccaggtggcagtcatggcctagttgtgtggaaaattattacttgaaacattctctcgtaacctctggtttagatttaatgaaatgaaatattactttgaaaaatccaaataatgtagttattggatataatttgggaaatgcttttaaaagattaatagaaggaaaataatagggtagaaatagaaacaaattagtaatcagaaaaatttaagatactccaataaccgcattttccaccaaaattgtcctttatctctgaggttcttaggggaggaaaataatcttccctctacccttctgagttcttagctgggacctttgtaacaaaagacagactaacaagagagaaaaagattcattaacttgtgtatatcttataagggagaaaactcaaggaaagagtaactctcaaaagaggtggcttagaactatggcttatatagcatcttcccccaaaaatgatgaatgtttacagggggacatgataatggaaaagaaccttgagtgtttaggggtacacattctggggaggtataaatataggggagactaatggtaaacaaagtaatggcagttagtgtactttggacagaggtttctctggcgccctctctagactgataagggtcagaagtcatctctggtgatttacttgtcctttctgatagagaagggaagaggggcacctttataaatttatgtctggcttttaggcaaatagggagaaagcggagagctttttgtgtatctgtttcttctcaattgcctttagctcaaaacagtcattgaacattgtgacatactttggagtggtatattctgctgcccttaagattcctctaattttctattttctactttaaagattcataggtagtgtgttaatctgctggaaactcagtttgctaatgggttactgagaatctttcacttagcctttcctgagttttctctaaacctaatgctacagacctcttgagatttgcattaagtgtagtcatcaaggaaatccacgtagataggaaaggggcagcctagaggttaagcaggagactggcttaaagtagtctggctttgttatgccactggtgacctctggtcaattattttccttctcaagccttagttcttcctttggcaaataggaaaagtaataggattttccccataatttgtagggcttaaatgaaagagtgcatatatgatactttgatttctatttttttttctttttacttgtatttactggatatttactgagcttctctgtgttaggtactagggatacccagtgaataggagataaaaattcagctcacagttgagcttctttcttagtggaatgagatcagtacttgatacataataatcttgtgtaagaagttatacagtttatgtaacagtagaacttactgtgtaataaaataataacaccttgttattctcttggggctgacaatacctgggggaaatgagaattctaattatctccttacacatccataccttatggctcctgcttcatcagggctcaaaggaaggaactgccaagagtttcagatgacagcttgctgtgttggcacttattattcagatgctaatggataaattctttggcttttatacttgggagcagatttaacgtgtcttcttagatttcattcataatcttattcacaagttctttttagcttctttgagaagtctgtaattttagaagccttagctcctgaatcataatgtgggagaacatgagttgattagcaaaaataatgttaagagtgatttcattttaattctagtgtgtcaaatctaaagaagacattgacaatgttagggctatatgtagcaccttgacattgctctaagcaataaggccagtaatagccatatcaaaatggagatttaaaaaaaatcatttatttgagtcttccagctgaaattgatggggagagggagctggtgatcattacttaaaatggcctaaaatatattttactgtgtggccaccacctctctcctaggttttctgctgtcattacctctttttccccattcacagtattggccacttttcatgcgttttgactctttgcatatggtgttttctccgggactatcctacctcctccacatagggcactgtaactcagcctccagtactgctagaatgactcttctatgactccttccccattcccctgggacagcttccccttccctgtgatctcattgcgtttggcacattgggtgttttcttcagtctgttgttcttcacactatttttgggcctgtgttcttcattggatccaaagcattaataacaatatcatttgctttttcatgacattataaggaaatcatggtttttaaatattataaacattagcttttgttagaaaagcagagaacatgttgattattctttgttaatatttgatatcttttatcctagtatcttaattccacaaattttgatttatttataaacctcattacaactcacaaatattcatgatattggtgtaaaataataaaaataataagtatagcttaaatactggtttaaattgcatccttgatgccattaattataagatacgtcattgttttatgtaccactaagaaagtaacaacaattgccaattacacccacactgtgctaagatctcattgactctaaaatgcattctaaatgtattctagaatgcgcatcagagatgttaaaatgtgtaaatattttcacttttaaattgatgatacatctaaaaaagatgtaagaactcacttgaacaaaatgaaagatttgtttctgtttgttttcctttccttcattgcctttggtagatgtactaatgagcagcaaagtcctcatagatgctagacaactgaaagatggaggacctgacaaaggatttgggaacccagcagattacataatccattcctgtaatattaaaaataatctacatataaagtaagggaattgtaagtagagagttgattagccacattgtttattcataaaattatggatatgtgtctcataatgtgtgaaaactttgtatgttcccttttgttggccgagatcatttccaggtgtgggtgtgagtggaagaatggtagaggagtgcagtttagatggaaaccttccagggatttgcaattataagtgttttttattattaactggccctgcaagtgtgggagtgtttcattttctttagattcattgtctaacttataatgaatatcatgagaagaaataaaattcagtttctagctgatttagaattggatcatatacttcattaagtgagggatgctgatagtaagtgtgttataccttgttctttctgtctctatgtatctgtccgttcatctgcccatctgttttaagattgtgtttctgttcatacagagtatagtatcgttagaagcaatattgtgcttctgttgtgcaatattgacatagaaagttttaaagattaagtggaaagaaatttagaacactccgaaattgtgatggtttagtttatgtgcatgtgcacacatttagttttatgggtaactattttcatgacacaggaaacagcacaatgaatggcttttttaggttatgttagaaacagttcattgtataacttctttgtgccaggtcttacgttgaattttcaagctaataggatgaataaattatgttttcagcatatctgaaatttataaactgttaaatgagatgtatatagttattattagacggaattgtgaataccatggttggcaggtgaaaatgattaatgggtaaaaagaaaagatgtagggaaaggggaggggggtaaagtattttctgttggttttgaaagataggtaggtctttggcagggacaggaatctacatttgttgaatatttacttacattgctaggcactatacagctctctataagtataatctcactgagtctcctgttactatagtccacactttgtaggctcagagatgttaaattaatttcccaaatattccagtaaggcagctaataaacgagaaaacttggatttgagctaggtctgattccaatcattgtattaatcactgtgcctaatgactgtactattcttattcatgtgtacttaatcactgtactattctgaaaggtattcaagacagaggaaaaaccataacaaagatctgggaactatgacagttcctgacaggttcacagaatcaggatcagcctgctagactagagccaaggtggagctggacacttggtctctgacacagtctctgtcaaaccaggatgtgctgtctgttcagtcattgatcagttttttgatgagtgttactgagtatctgttgtgtgccaggcagtttgcttggtgctagggattcagaaatgaacacatgctcttgcctttaaaagctgagtctagtaacaaaactgagactgtcagtgatgattttttgctttgcttgtttgcctaagaagtacttcctcactcaatataaatgtctagattgttgaattatcttacagtttcaaaactatattaggtacatgtgttctgttcggaatgtgtcccccaaaatccgtgtgttggaaaattcatcttccaacatggcagtgttgagagatggggtgcttgggtcatgagggccttgcctagaaggcgctcactagacattgatgctggcgctttgatcttggacttctcagccttcagaactctaataaatttctcttctttataaattgcccagtctattgtattctgttatagcagcacaaacagagtgagaatcttctttctctctctacacacacacacacacacacaatatatatatatagacatatatgttgtacctatatacacactatgtatatatagagatgtagttttataactttattctgaaattaattgaggcaagtaattttggtatcttttatcttcaattttttttccaagaaagaggcccctttattttccttgttgaactactactattttgatatacttggttctcataatttcagtgctgaagctattgacttaaaaagtacattgctcctgctgttaaaattcttaaaagtttcataaacgagtgtcaaatcaatctgtgactgaatgaacgcaaatgcaacgttgctttcctttaactaatatgtggctggtgtgctgctgcttcttcccctgacagaacggaaatattttgaagtatacctcagccttttaataattttccaatctgtttcaatcttctgtaattactcataaatttcctatcctcacttctttttaacaaagcttttgaatgtagtacagacttagtataaacatttatctgatccaaaggcaaatatagaaaacgttaattttccctttctgcttttcatttctactctcctaaggtatggttttgacatgttaacaccttttctatattcatttctagtaactattgatgaagagaactgttgtatgtcaagaagtaatttaaaaagatgaatagaattaggaattaggatggatatggatatgagtaagttcttaaatataacactgttttataaaatcttcccctaagctttgaagaacaaatgttttctgagttccctataacttatttcagcagaggaaaaaacccctacatggtgtttagagtgagttgcatctccttttgctgtttagggaattagtggttctaagtccctttctctagtctcttaaaagtttccaatctacgcagacaaatcagcatgaattatttaataatttttgggaagaaaggatgctagatagtgttgcacaaattatttgctttacttgtagtctgaaacccaaacaatctatcattttagtgatcctttattatattctagcctaacatttaaggattgttggccagcaacttcttaggagtgggatacattgcttgggaggtcgctttccatcagtaggaactcttctattttacttgtttcacatatatatatatatataacttattcacatatatattatataataaatatataacacatatatttatatattataatatataaattacatataatatataatatacattacatataatatataatatacattacatatatataatatatattacatataatatataatatattacatatattacatattacatatataatatattacatatattacatattacatatataatatataatatattacatatattacatattacatatataatatataatatattacatatactatataatatattacatatactatataatatatatgatatataatatatcatatataatataatatataatatatataatataattaatatataatataatatataatatgatataattaatatatattatataatatataatatataatatataatgttatatatattgattatatattatatatataatatataaaatataatatatattatatatataatatattatatatattatatattatatataatatattatatatataatatataatataatatatatgatatatattatatatagtatatatattatatatattatatattatataatatataatatataatatatataatatataatatatattatacattttatatatataaaatatatatattatatatgttatatataatatacataatatatattatatagtatagtatataatatactatattatatagtatataatatactatattatatactatataatatagtatattatattatgcaagctcaggtggtaatgcttgcatgcctactgctcacctcctgctgcccagccagttcctaacaggccaggaaccagtactgggatgcggctggggagctggggactcctgacatagagacctcgtctctacagaaacaacaacaacaacaagaaaactaacttgatgtggtagtatgttcctgtagtcccaggtacttgtcagacaggcaggcaggaggatcacttgagtccaggagtttgaggctactgtgagtcatgattgcaccactaccctcttgcctgggcaacagattgagaccttgtctctaaaaaaaaaaaaaaaaaaaaagccagttgcagtggctcatgcctgtaatcccagcactttgagaggccgaggcaggcacatcaccagaggtcgggagtttgagaccagcctgaccaacatggagaagccccatctctactaaaaatacaaaaaaaaaaaaaatagccaggcgtggtggtgtatgcctgtaatcccagcactttgggaggccaaggcgggccaatcatgagttcaggagattgagaccatcctagctaacatggtgaaaccctgtctctattaaaaatataaaaaattagctgggcttggtgactcgtgcctataatcccatctactcaggaggctgaagcaggataaatcgcttgaacctggaggttgcagtgagccaagattgcaccgctgcactccagtctgggcaacagagcgagactccgtctcaaaaataaataaataaattttttaaaaaagtacaaaattaataagatacaagagtaagatatgcagagtaatgcttcttttcactattgtgctcttaacattttcccttttgatggatagtctaaggatgaaaagatatatgtgtaaaaatatacgtataaaaaattttttttacacaaatggtaatgtatcatctgttatttgaaccctcctttcctacttatttttgtcttggagaatgttccatgtttattcccatattcctgtagtttaggtaatatatagctatttcactatgtgggacatagcacagctgtatcaatgggcttttgtgttctttccattctttattaaaaacaaaacctttgaatactctttgttagcaaacttttttttgtgcgtatgtatatgtatacacacacacaattatataggctggatgtggtggctcgcacctgatagcaccactttgtgaggttgaggtgggtggatcacttgagatcaggagttcgagaccatcctgaccaatatggtgaaaccccatctctactaaaaatacaaaaattagctggatgtgttgggacatacctgtaatcccaattactccggaggctgaggtatgagaattgcttgaaccttggaggtggaggctgtagtgagccgagatcgtgccactgcactccagctttggtgacatataatctctgtgaaaaagaaatgcaattgtagagatacctgacttgttctgtttacttcacctggacctggatctgattaagggacactgagactgaggtggtatcatttgccagagtacttatctgtggcctagtgtaagtcatcagttggtgtcaaagcttttcctgttgatagcagaagttgctcttaatttctcttaaagcccacagtgcccatgagatgaaaatgtttgcctgttttgggtttagtaggatttccttcagtatgggtttgactcttgatatggtggattgtgtctgtgtaatcagaagtcattcgtgaatcacaggtcttttgcatttaaatttttacattttatttttaaaaaactgagtgaataaaatgacttctgttcagaagtacttcgatgacatagtgtgttatgtaatctatatcatttaaagaaggtcctttaaagaaggttattaaaagtgctttttaaactctaattccaagtaattgtcagatgttttttcctcttaaactgtaggtctcggggaacatcagactgttgtttaagtatgtctaatttagcttaatttgtacttattttgattatatttttagtatatgtgctgtcaaagtgagcatgtgtatttattttaattatatgtattggtataactcgagtcaaagtcctctttaaggaatattaaagaaagaaaagatctacatagtataattgtttattcttagtattgttgatatgatttggctttgtgtccccacccaaatctcatcttgaattgtaatcccataattcccacatgccatgggagggacctgctgggaggtgactgaatcatgggggtgttttcccccatgctgttcttgtgatagtgagttctcacaagatctgatggttttataagcgtctggcatttctcctgctggcactcattctctcccctgctggcactcattctctctcctgctggcactcattctctctcctgctggcactcattctctctcctgctgccttgtaaagagttgccttccttcatgattgtaagttttctgaggcctccccagccatgtggaactgcgagtcaatgaaacctctttcctttgtaaattacccagtctcaggtatttcttcatatcagtgtgcgaatggatgaatacagttattacatgtgaagcccacaaagctttaaagcccacctcttcccaaaataattctcatcaaacctaaccaaacctaagtagaaagggttttcaaagggagtatttactgccatgttgaacctccttggcctttcttctactgcttgccatgaagagattctgtgctttttgatatgggtggacatgggttgaggttacaggagtagcctaaggataaaagtcaggctttctgtttgatttagaagcgcattccaaacttagagtctgccttcaggaagtgtgttgaaccggcttttcaagtgtaaagactattgtgggccctgctgtcaacatgtcaaaactaatgtgatggactataatttttagtactttatgatgaacccttagggttatggcattacatctacagtttgctaggcagtgattgattttcttgattgacaggagacacagtttattgtgccccatgtctgcagggcaagggacagttgatggagcagctttgaactctgccagcaatccagagatgtcagtgtgccaagataaagaactcaacttcattcatttggttatagtgagaatgtgtttattggcaacaagaatatggctaacctttgtaagcgtaaagaaagaaaacatttcttgctatagccttctacttttatgtcaagaaagactcagaactttgtcaggtttcacttgcacttccccccacttcctacagagcagaagcttactagttgtaaaatataaagtgttctttttctcatgcatttctaacatatatagattcttgtgagaatttattggggcattttgtttatagtggcatagattttataatattaggtttagtaaacttggacagacccattacagttgcattatgggaggtaatgctcttagatggaaactgatttaaatcattcagaatctctttacactttcaacttgaaaggttggatgacaataactagatatatgctcaggtttgcagggcccaaggcatattacatggatttctttcactatataggtagtaagcctaaacatctatttacctcaaaaatacttaatctattctcaaagaaaatatttacaaactttgaaattgtatagttgcacattttgaaccatctccagtttcattagattgttcttgagctatcatgatcaaaacacgatttagcgatttgaagggaagccatttggcatctgtagctgttgctgttgtcctttctaataccgttcctggaacattttgtatcatattgatttaagtgtagtactcagggcttcaggacctggaaagggccactgagttttaggagggagtaatttcattctgcaaagaatccttttgggcaagcaaccaagggaagagtacttattcaaattggggacgagtcacttgatttttagagaaagcatatggaattgatttattgtaagtggacataaagtcattgctgaaagtgccgctcagcagatacttattgagtgcttactgtgtatgtggcacagttttaggtaatggatccaggaatttatgtgctagtgtggggagacagacattagaaaaaagattgaatgaacaaactggtgataaatttattataaaaaacaaatcaggttaagagtgagtgctagtgtggagtcgaaggtgtttctatcttacatagattgctcagggaagtactatgataactaacatttgagcagagagccaaggaattagtgtgaaacggaaagtaaggcattaactgaatatgtggctatctacagtaagtctaaaaggtggcattgtgctctgtatgttttaagagcagcaaggagggcagtgtgtctgtcgcagggatggggcctgtgggggaggagggagggacataggagataaagtagggagagagagaagccaggttatgtagagctttgtaggtgatttgtgaggaatttgacttttactgtgaaaggaagccagtggaggtttttgaaccaggaaataacttcctctgactatattttaacaagatccatctggctggtgtgtggagaatagagtataagagaggcaagtgtagaagcagagaggccaattagagggctgttttatacagtctagagatgaaaactgttcacggggaatagagcgtcggtggtagatatggtacttggatgggcagcactgtggatggagcaggtttgcatggagagaagattcagaaatctgatttggacttgttgagtttgagatgtctgttagttctccaagtggaattgttgaataggcagttagacatagagttctggagttcagggggaaagccccgggttggtgtcttgcatatggaagtcactattatagacggcatttgaagccatgagactaaaggggattacttagggagtgggtatagattgagaaaaggtccaaagatctgcatctggggcactgggcactcttacatatggaagctagagatattcactatttattcaacaagttttattcagtactttctatgcagataaggaataagcagcaaacaaggctgagaaggagtgggtcagtcacacagaaggagaaccaatagagagtgttttcctcaagtcaagggatggggggattgcttgcccaaagtgattctccgcagaatgaaatcactccctcctaaaactcgatggccctatgtcctgaagccctgagtactacgcttaaatcaatatgatacaaaatgttccaggaagggtactagaaaggacaatagcaacagcagcaaaagccagttgtcttgccttcaaatcgttaaatcgtgttttgatcatgatagctcaagaacaatctaataaaactggagatggttcacaaagtgcaaccacacaactctctccctactttatttcctgtccccctcctttctcccccaccgcccccatccctgatcattcaagaagaaagattcaaggggtgatctaccctgttatgctgccgagatgtattaggcaagaagagaactgagaattagtcattgagttttacagaagaggtcactggtgaccctgatgagcattatttatgggatatggtaggatgtacatctcattgaagtaagttttgctggagactgaaatagaaggatgaggcgaaacccgaagatgatgaaggatacagtgattatataatttattatccaagccagggcagtctgcgaatgaatggaaggggacacagtttgttattatgcttgtgcaactggcatataccatttggtcactcttgggagaggacaagaaagatttctcaaggaagtacctgtttatttctactctttgtttactttctctgaagcaatttcttatatgtgacttaccaatttttttagtccattggtaattcaattattttaatagactctggtatggaatatttgttcagagcactttaatagttctgctttgtccacatgcaatttatttcctcaaagaatgaattgacttgacacttttgatttccctatgcacacttgaaaaaaatactgtgcttaaatatagaagtttgtgcaatatgaatacgaaactcagtactctagaattttcatggtttaattgaaatactttttagggatgagatattcgtaataataatctttggtcctttggcaaaataactgttataatgactggcatgtgctttggctaatattcattttatatcagtttcagtaattttttaaacagaacataaaaacccttgataacttgccattaatattttttctattgtaaattgtgttttattataatgtaatttcatttacaatactgggcttcagtttttttcctaaacaaatctcataccatatcaattttcaaaggggaattcatttgtgtttatgaaaatccacaaataatttattgtttgctatttatatataaaattttcagagaacagcaatgaaaaagagtgagatacagatgaaattaatatgttttaaagtaacattgctggttatgagggctttacactgtcattagctaatagcataagacaccataccagtggttctcaactttggtgacatgttagactcttgtggtgcttgtaaaaaatcatgatgcatgggccctactccaggcaagttgaataaggatctcttggggaaggagttggcttgcttgcttgcttatttatttatttagagagagggtgtcactctgtagttcaggctgggatgcagtggcatgatcatagctcagtgtaaccttgaactcctgggctcaagcaattctcccacctcagcctccagagtagctaggactacagacatgtgccactgtgccaagccagttttttaaactttttttttatagagacaggttcttgttgtgttgcccaggctggtcctcaactcctgtcctcaagcaatccttctaccttgaccacccacagtgctgggattatagccactgtgctagctggcattaaaaaaaatctgtgattacagagaggctgagacctactactctatatactgaaggataaatttatcatttatgataattgatgtaagtctgaagttcaaatgtgtttataatttcccttcctccctccatccctttcttcagagcttagttcttatcagagctagttagagtctacttcaagcttgttaagacttgctagttctaggaggaagaagtgagcagttcagtatttacttgtatgcttctgcatgcttgtgcagaatttgtattatcttcaatatgtgttaaagaatatctttaagccacttacccattttgtgaagattatgcaaaactgaataatctgtagttttgctttcctgggcacaggtaaactgtaggtcatcctgatatacaggagaagagtgtgaggtgctgctgacatctctgtgtggtgcagctctcgcatttccttagcatatctcactcgcagtagataacctgtgaccatctactataaggacaagtgaggtccttgtgcttgtctgcatactaaatatcgtcttaatttctttttaattaaaaaatacatcaacctttcactcctgagttgcatgactgcgttttcgagatcattgatttagagagtgactgtggtttctctcatagaattcaaatagttttccttctcacagtcggatataaaaagaaattggttttcttgagattttctcttctgttcttgttttacttcttaattaaaagaaaatctggatgtcatttagttttccaaaggtggaatagaattatctttgccttctggcatagtgggtttttttcttgccttttttcctgaagtccaaacatgcttttgggcttccgtcataagggttgacagttttgtcccatggagtaatcactgaatgaatacctgatggaatagttgttcagttctgtttttgcttgcctcagagctttttaaaaaaattaatagactgaaaaaaataactttagatttacagaaacagttgagaagatagtacagagagttgttatataagccccatgagcagcttcccctatattaacattggacgttagtatggtgcatttgttataattaatgaaccaatattgatacattattatcattttattattccatagtttattcagatttccttagtttttgcccagcatccttttactgtccaggcatcccctccaggataccacattacgtttagttgtcaggtccccttggctcctctgacagtggcagtttttcagactttctttgtttttgctgaccttggcagttttgagtaacattggtaagttgtattgtaggatgcgcctctattggaatttatcttatatttttctcctgattagactagggttatagacttgggggagaaagaccctggagacagtgccattttaatcacatcatgttaaagatacatactataaacatgatttatgactattgatgttgaccttgatcaccatcctgaagtgtagtgcttattatatttctctactgtaaaggtttctccctcttttcataatcctctttggaaggaagttactatgtgcagcccactctctgctgtgtatagcctatagctatgttctttctcctttaggatggaggattgtataatttatttggaattattctgcctgggagatttgtctcttgtcacctgtgtattaatccatatggattgatggatatttatttcatactctgggttgtaatccaatgctactttactttttcctcaaattgttaacagttttggccattgggacctctttcagttggctcttgtgcccctctgacctactctcatctctgtgagtatttttgtttgtttgtttaggggatcatgttctttctttcttaccggaactacctggtgctccaagctcatcttgaatacttccttaataatagaatcagccatttctctatagaggcaggattttgttgttgtggttacagaagagggagaactacatacagtaaagacagatgggatgcccctccccctttcttaaaatctgaacttgttacgtttagttttttaccttcaaagggcctcttccctttttagctcaaggctgatgatttgaccttatttttattttcatgttataaacttggccttttgtacttaactcaggattttcatgcaatttggagcattttggtttcaatacatccatgattagggatttttcatcttctgtcattgaagcgcattcgagaaagcaattcagggacttttgacttaacatttgaaggattaagactagtctgtctgtctttgttcttttaaatggagtgcatcatacatttttataaataatgaaaaggttatttcaccatcgcatttgaaatcctgctgtctgtgcctacatttgtctttgagattgccttaggacacctgattaaaaaattttataatttttataacataatgaagaagttctttctagtttttttcttaaatctttttgcatatcccaggaacagaatcaatgtgacagctggagaactacttgaaataagactattgatttttcttacttccttagttcccagagttttctgaattttggggcatttagaaccagaggcattgtcccataattcagtatctgagagtgatatggagctatattgtggtggaatgtttggctgagaaacacccatacactatttaggaaccatggtgattctgtatgctattttttctgcaacccgctatggattagtaatcaggaaggctgcgagcgtaaaataaatgccatactgacttccaggggagacaagattagaaaaggaaagactgtcagatcttattagaaaactaaactagattagaagagaatatcagatcccattacctaaataactttatatacagaaacagcctaccataaatgttatgtatagaaatagctgaagtggttaattcttttttattaataacatcattagtaaagcctaactgtactatacattttatactgcttcattcttttcaaaaatgaaatgccttcacggatattaccttaatgaaagtattggtctagaggagcagtaatgtggataatagtgctttcctctcttaccagatggctctgtgaagcacaaaaataccaagttcatatatcaaataatcagtaacagcagtttcaatcattcatgtaaacttacattcaatattgttgaatgcctcttttggcagtgtagactttgctacagagaaaaggaccattgggttatccaaattattagctccttgctgttgaaatcttattgagcatttaccatgagccagactctgaatctcttaaactgatgctctgtccaggtgggatgaatgaatgagctaatgcattcattttgaatagtgcattttgatgcttgtcttctcttctttagagtcatctcagattcttgtttaggtcatctttaccttaacacaatctggactgtgatcactgcattcattacaattaggtttttttttttctctagaatatagaaacccaaaataacagcgacttgtacagcatagaagtatgtttttgttttttgttttttgttttcgtttttgtgtccccaaaacctaggtcagggcttgacacatgttacttgaaataataaatgcattgccttgcccgattaagcttcactgcccccactgaggtgatagattttagcctatgaaacaagcaccatctgggtttagggaactggtatggtgataacaaagcaggatttcttaaagcttagtccatggaccacctgtggtagaataacttgcttgtaaaatgtagattgccatgcctcatgccaagggatgtaatttgaaaggtgtaggatacggtccagaaattttcatgtcttataaattcctctgggtgatctgagaaccactgggaaggaaaggaaaggagaggaagaaactgatttgcagtctcacaaccttttaataaattctcataaagtagtggcaggggctctatttccagtcctggctcctgaagtcatggtaggacctattgcttctaggagtgctctccagaattaaggccaagattaggaaatgacttagaagtttatttttcactcatgtaaaataagctttgaggcaggtagtgaagtgctggaacggaggaagattcatgaagtcatcagcaacccaggcttctttactctgatgcccttgttcttatgatccaaggtggctgctagaatttcattcaaagaatctatcaattcttacttccagatggcaggaaggaggaaggaaatgagtagaagataaatccccctttattttaaggagacttgccagatataacaaagaaagctatatacatctctttggccagaacttagccttatgaccacatttggccacaaggttatttttttcttacctggcccagtgaaatgaacaaaaatcccctcaggatcctcttaataaagaagaggctattactggtcttcaccataatcattcattctaaagctgcccaaataaacatcctggattctgttgacctcttggcaagtgattttgccagttctcaaaaccagctatcgtcaccatcctgtttacgcctactcttatgtctcctcctcataattggtgggaaaagtgctaaaattatagataaatatgatttcatattaccttttagttaattccaattatatttctatttttaaaatgtggattgttatgtcctgtagtctgttttttatacagttgttttaaaaatgttccgtattccactctaattctcccctctcactttattttaccttgttttaaataggtgtaggtgcaggccgggcacctgtaatcccaggtggctcatgcctgtaatcccagcactatgggaggccgaggtgggtggatcacctgaggtcaggagttcgagaccagcctggccaacatgatgaaaccctgcctctactaaaaatacaaaaattagccaggcttggtggtgggcgcctgtcatcccagctacttgggaggctgaggcaggagaatcacttgaacctgggaggtggaggttgcactgagccaagatagtgccgctgtactccagcctgggcaacagagcaagactccatctctaaaaattaataaataaatagggacagttccagtggctcaggcctgcagtcccagcactttgggtggtagagggtcgcttgatgccaggcattggaaactgcttcttacaaaaaataaaaatattagctgggcatggtggtgtgcacctgtagtctcagctactcaggaggctgaggtgggaggatcacctgtgccgaggagtttgagactgcagtgagctacgattgtaccactgtgctctggcctgggtggcagagtgagaccctatctctttaaaaaaaaaaaaaaaaaaaaaaaaaaaaaaagacaacctcagttttgaggcacatgacgcgccttcatgtgcctcagtctcagtccctcttttctcagcaggagatacgccttacaggtggtggtggtggtgggggacacaccatttctcttgactgctgttcagagcagtgcctgaacaaggtgtgctctgaaaatacctgttgaaagaacaaatggacaatttcccttcttcctcttacttccctctcctatttaggatataagattgtttctatattgaaaatattttatctcgactttgttgcattattttttccatttctcacagttaactttttatattttaaggaaaggtgactattcttccttcttaatcaactcctgactgttcactaattccttggtcacttcactatcttgagtctccctctatgaattttcagattttctttgagatctccctcccctcggcctcttgttcaatctccttgacatttctgtagcatgctgtgttatcggctgcatgttcttggaaataccttcttatccttctgcctttatgggttttccttctgtattttctctgttgacctccttcggctctgttacggtgaggaaaacacaatgtctttgctttcgtctttattcttttctctctttgccctcccctgctttgtgcagtatctcagtggcttgcctactcttttaccttcagctctgatctctatatggattccgaattatataaattgtgtttactactcattactgcatcactctttttgtagaggaatttaagttggtgcctcaacttaaattcctacgttatcttaaacattatgtttaaaattactgatgttagtatcacatcattagggcattgcttctgaaactgttcattggagtaaccctaatggataaggagagcagcttctcgtgggctgtttttcttgtctagaaagccccttcctttattctttgcaccttctttctctttgaaagatcaagttcaaaaatctacatttcacaaaaatctctgggatgacaccagactttattggcttcctagcctttgaactcccgctatactcatttatctatttatctggcattcctcctgtgcttctgttatattgtattttgaataaatcatctttattttaagtgtctcatctcacagcttgtaatcttatccctctttgtactcccagtgcctggtatacaattggcacttaataatatttgctatggatgatggcataccctttttatttacttattgtgttccatttctaacagtgagattgcttaaaaacaatttttcttaaacatttaatttttcacaaatgaaatggagggtgcttggactgaactgaatgacagattttcaatacctgattgtactttgctttgcactattttaagtacattataaaaggtgtggaatgattgtcttaaaagtaaacttttcttcatctttgtctttggagtgtcattaaaaacctggaataagagaatcatgagaagacctagtaggatttctgaaagcacacagggttttgctttggaaagttcaggatagggtaagcgtggaaggaaagagagaaaaagaatatgaatgaatgtgaaaatacacacccactagacccataccatttgataaataaggtcaggatgatataaaactagccaggtagaaggatagttgtgtcaaagtagtagatatattggaaggatgagaatttatatcaagaacatttgtgctcttcaccccctacaaaaagtttacccagttgtttctatgatacattgctcaacaatatggtaatgtgacagatacactaagtaaaataggacccgtttatgtatgatgccttttaaaattaaggtatgggaaattcactgtgattgaactttagttctgtgtatactgaaaatctggactagtagtgtatgattttagactcatataagaggaacaaaagactcagttcacttatgtattttattttgctttctttttttctctagggaatttgaagtactgccttgtaattcttaatcagcctttggacaactattttcgtcatctttggaacaaaggtaaccttaattagcatttctgtttctttgctttcttactttatttgtgactgaccaacatgactattaagtaccctgaaacctgactaaaaagtggaattcataataaggtgattcaattattaatgattagaataatttattatcgcttctctgttaaactgtttaaatgtgatttccaaagcatggactccgaaggacggaataccatactgtatttcagaactacagtgtagatattaagcctgaatcctcaacaagtatttgttcaagtgtaaattatttttggcaccagtggtagcagaaaagcatccacatgcctcatctgttgcagcatccaataaggtatctgcagggtgatcagatttgcaaaatcaaaaaagatgatgatgctagtatgtaagaacctcttggggtgctgaaaaatatagttaaaaatgggatagtgtcacagaattgatactattggaaggttttgtgtaagaaacaggcttcattaactgtttatattattctttaacttttataggattatctctaggttggaaaataatgttcaatatcgtttgctgttttgaatctctgttcttctcccatgaaacaatgaattttgttgttgttgttgttgttgtttttccaaaggagcatttttgttgagttgtcagtggaagttttaggccaaggtagataggcagaagaacttgattcgtgatgcattgatgcatatttttgccattcctgattccctcttatcatcatagaactctttagtattctcaacattgtgtttatgtttcttagaatgcaaacctcgtatgtgaataagctcacatctgtagttgagatagttgtgatactagagggaataaatcatcacaagtgatttttgtgtaaagaaccttttttgtctaatatagtgaaaactcttggtattctaaattgaactatgtgtaagttagtgaacttaaaatttcacattataattgtactaacatttctctcaaagcataaaaattatttaaccattaacttttctttcttagcaccccactaattaggtagttatttgaatggctgtgatgtcttttgtcactgtgtctctagtgcctagtgcagtatctgtcacataattgctattaatgacaataaatgaaagaatgaatttagtatagcttctattgctagaaaatactaaaatggttaggtatatcctttctaattgaatttattgtatcatattttatattgtttggggagagtgtgagtgactgttttattgcaaacattagaaatagaataaccgttgatccaaaccattggagaccttgaatattcaaagctacatctaaagaagtctgttacgtttgggggagttgagggtcttaattttgcaaacagtgtgaatgatgtagacttttgagccgaccgaagttcctcatttcattagtttttccataaggatcagtctgtacatgaaaaaaaactaaggtatctgaagtatccggtatactgaaatggctagttaattctcatttccaaaataatttgtcttttttagattattgagatgttaagttctttcacatatatactaggataatccttggtgttctggagcctttaaccattgtaagaaacaggcctattgataaatactaaagtgtaggttttttgtgattctcttaacagaagctgtgctttttatgcttgtagtgtccccttttgtgtttcttttctcccgagtaaaggaaacaaaatagagaagtattgagcttgagttgttaatcttaacataggaaaggcttaggaaaatggatagggcagcattgagagtttgggagaggagacagtattatgggttggggtattagcaagtatgaagtggcttgggggtgctgtccccattaccttttaatacgctcaacattttctgtaacttctgttctatgatacaaagatttgtgaagagctgaaatcaagggatgaagactgggctgttaaaatggttgcaagcttcaaaatgcagagaaatctgaagagtgttgcatagtatatgagactcctgcataaaactggcaatttcactttatgccaaggacttctgctgagtagatgtttcctgagattcatttcaggggaaagactatgttgaaagtttatcttaaagtttcttcctgcaatggttaagtgatatttttaccagcagcgaatccatacgggcctgcagcaaccccatccttgcctgctcagggatataattcagctgagggcagaagtaggtttaaggtaaagggagagactgaggcaagttttagagccggagtgagagtttattaaaaagtgttagagcaggagcgaaaggaagcaaagtacacctggaagagggccaagcgggtgacttgagagatttgagtgccctgtttggaccttgatttggggttttatacatggccatagttcagggtttgtgtttcttctcccctgattcttcctttagggtgggctgtctgcattacagtagcccagtggcccagtggccagccagcacttgggaggggccacatgctcagtgtgtttactaaagttgtgtgcatgctcatttgagccatttttcctttaccagtcaagtattcccagaggaagatcatataccagttaaacgccaccattttgcctcttgcagtgtgcatgctgagcctacttgcccaactccagagaccttataaggaagcagctgatcaccagctccaggtgttttctatctattgggaggttgcctttccctggtgctggctgccacaaattattttagagaaacagtttaacaactgcctgaccatcacctatggtcccctgacattcctggggaggggagttctcctgctgtgctcatgtctgcctaactacctactctgacaatgtcagttatgagatttagcttaaatgcctaaggagggagttcaagagagattaaaattatggaggttttaatgtattttctcttttatacatcatgaagtttagtgattttcttggttagaagtcttggagcatatctctctacctgttccagcattttctacgtttggtttgatgataaagtaagcacttaggtaggtagatgggtaaatagaaaaatgggtagatagaagtagagttaatatctaacttttctgtaatatcagaggttattgctatttgtgacttgctattggtcttaggtttactaacttttttttttttttttttttttgagatggagtcttgctctgtctcccaggctggagtacagtggcacgatctcagctcactgcagcctctgcctcccgggttcaagtgattctcctgcctcagcctcctgagtagctgagattacaggcgcacgccaccatgcctggctaatttttgtattttttagtagagatggggtttcaccatgttagtcaggctggtcttgaactcctgacctcgtgatctgcctgcctcggcctcccaaagtgctgggattacaggcttgagccaccgtgcccagctactaacatgtttttaaaaaatattttgagtcaggctttatttcaggaagtgtctttctctacctgaaatatgtgataagtgcaaaagtagggatatgtatgttagaagggctctgcctatttcttgtaggttagttattctcgactggagtcacagtgctaacagtgttctcaaagttagtagtggagatctctgtgctacaaaacatcatgaaaaacagacatattggaataaggttatattgagtgtgtatgaagtttctaggagttcagcttaacacatatcctcattgttagcatgtattcacagcctttctccactttttccacatgatttacagcacagtggtgatcatgttaattagattatggctagatgatcagattcttttactatcatccttaagatcaccccagggtatgggcagtgtacttattttcattgacactgaagtcataaaatatttgacatatcaggcaggtcttacagattaaaaagaggcacaagtagcattcgtgaattaaagtataagcaaggtctttggttttatagcattagttatgttccatttgttattgactgacactagttgaggcccttctgtgtcaggcattgggctggttgccagggacatgatagtggctagaattgagaggtggagtctgttaagtgcagcctgttcctgtgacggcatgtccgaagctctgtctgtccaagccgcaagtgcttagaatgaactagccatgcccctgcttcttaagaattgatatttttgtaatagttggttaattgactctactcgttcatttctatttgcttttctttaaaatgaaaacactctacctagtttgtaatagactaaatagacttgccataataattatgctaatcttgtgctagtgattagtattggcattaggtttgttttaaatgaggtagaaatctgctataaagcaccttatttcaattgtagtttttttgtgacaaactctttccttcttaaattatgtaccccaggcttttatgtaagccttgaggttttcacttgattattttaagttaaacacaaccaactttatattatataaagttttctatcctataaactttatattaaagttttctatcctataaactttatattaaagttttcctttatctttcctttttcattcttatttctctatttagtgggacctatttatctcagttttggtgtcttctgtgtttttttctcattaaaatagagaaatcagatacctgtcacttttacgtgtagattggttgaatagatagttatgctttaatgtgcttggtatcagttgctattttaatcctgtttcatctattgtatgcactattcctgttagaggaattttaagggaaacatgttttttgatgataactttgaaattttgaaatcaccttaaggtgatttctttaagctgaccctggaagggccagtccccccaagaatgtatatccaacataattttttcctttggcctcatctctatggctacctcttcctgtgtatttaatgattaatctaaatagaactgccatttacttttttcctgcggaaaatagacttttacttatttatattgcagactttcacccatcctttaaggtccaactcaaatgccacctcttctgaaaacttccttagcttccccaggtagagatagattttctcaaatgtcaccttatctttccttgaggatgaacttcttgaaaatggatgcaaagtgcttagctgatggtgttttcttagttcttgtgagactggcctggtagccgttgtgggtcatcctgacaattggggaaggtcactgcctgtctttgatgcagccaaagacaggtcctggaaatcctcttgcgctgatgtggaccagttagcaggctgcaggcacatgcttgcgcctcctcatgcactctctttctctctttttccccagattcctctttggtcttcagtctcagttgagtcccttttctaattctgctaaacttgagctttgtcactcacattttttttctctgctctatgactcctctgtacttatttgatatttcctggtacacccaatcagaactgatattttcattactctctccttctttcgttatagtgcatgtgcaaaaatgtattttttttttttttgcctttttggtttcatgcctttgacagttaagatgccagtaaatgtagcattcgaatatatcttctttgtctattaagatattatggtagggtgcctcttttaattatagaaggatatataagttagcagtaccattgtcttctgacattattgtctaaagagattagtcatatattgggtcctttttgttaaataacttgtttatgagaactgtagattaacttatttatttatttatttttgagacacggtctcactctgtgacctaggctggagtacagtggcatgatcacagctcactgcagtcatgacgtcatgagctcaagcactcctcccacctcagcctcctgagtagctaggactacaggcgtgcaccacatacccagctaattttttattttttgtagaggtggggtctccctatgttgtccaggctggtctcaaacttgtggcctcaagtgatcctcctgcctcggcttcccagagtgctgagatgataggaatgagccactgtgcccagccattaaccttattttcataaatgtaaattctttagtttttccttagatttttcatctttaattatagaaccatgtgtgcatttttaaaagttaaaacctcacagtttggtttaaaaatgtcagtccccattaaccatatatatatatatatatatatatatatatatgttttttttttcttttttcttttttgagatggagttttgctcttattgcccaggctggagtgcaatggcacgatctcggctcattgcaacctccacctcctggatgcaagtgattctcctgcctcagcctcctcagtagctgggattacaggcacccaccaccacactcagctaatttttgtatttttagtagagatggggtttcgccatgtaggccaggctggtctcaaactcctgacctcaagtgatctgcccaccttggcctcgcaaagtgctgggattacaagtgtgagccaccatgcccagacccatgaactattatttctgtcattatctttgttttatgcttttaattttacttttcattatttctcatgaaatgatttttaaatgtaatttctaacagggtaataagtgaaatcctactactaaatagaaagatgcccctgaattggtgattgtaagaccatgtgactctgtgtgcttcatggcagttagtataggcatttcaactgcctgttttacttcattctttatgccatttagatctctgtccaatttgtatgtcaatttttaatgtatccagaaaatgactgccaagtttgtatggctacttatgttttcttttttaacattcaacattttatgtatgttttttgattgtttgctccatgtttaattcacttgcatgtgtatacacacacagatacacaaacacaaacagacacacagttttatcttttgtttgcttcagtgaagtgggcctggtgtgtggataatttgaggagtttaaactcattgctaataattatccttgctagagaggctaagtagtatctttgtgatgctgtacctttagtgaaagaaattaaaatttaaaaaaacacaaagaattctatttttatactaaccaggtggtaggctattacataaaactagaaaatataagtggaacttcaaaacagacaatttactagaggtgaagtcaacattttgcatttattttcttatagttgttggtgcccagttctttagaaggtgtggtatcattctcccaatcaaaatgcttgggtctcaaatgccctttactgaaacacagacatcttcatttttaacaaatatttactttcctggtaatatatttgttatgcagtaattaaggtcttttctccttggtggtgtttctttttttttttctttctatttcacttgtaatatacatttaatcagttagttttaaagacatctgaaaatgtaggcttgggaaaacagccagagaaacatggtggggttcaccttcgttttttcccacattgcgtagtgtatagtaatacacagaaacagatatttttgccctgccctactataagctctacataatgttatatgttagatgtatattattgttcctcctatatatatttaaattgtcattccatgttgcttctcttttgtaataatttgttccaagattgattccttctagaatcttatttttaagatcatgccatttaattgaatataggtaaattaaagaacgtttacactgagcatttgtgtgtgattatacattaaaaaataacttgaacttttttaatagtcctagttcttgggggcaactgagacttttgagctctcagttttacagtgatagctgctttggggtccatggaaagaaacgtccatggcacagaaaagatcatgaggggatataacatgctctcctcccatcacgctacctaacttcaaactatgctacaaggctacagtaaccaaaacagcatggtactggtaccaaaacagagatgtagaccaacggaacagaacagagccctcagaaataatagcacacatctacaaccatctgatctttgacaaacatgacaaaaacaagaaatagggaaaggattccctgttcaataaatggtgctgggaaaactggctagccatatgtagaaagctgaaactggatcccttccttacaccttatacaaaaattaattcaagatggattaaagacttaaatgttaggccaggcgcggtggctcatgcctgtaatcccagcactttgggaggccgaggtgggcagatcacaaggtcaggagatcgagaccatcctggctaacatggtgaaaccctgtctctactaaaaatacaaaaaattagccgggcatggtggcgggtgcctataggcccagctactcaggaggctgagacaggagaatggcgtgaacccaggaggcggagcttgtagtgagctgagatcatgccactgcactccagcctgggcgacagagcgagactccatatcaaaaaacaaaaaccaaaaaacaaaaaaacaaaaaaacttaaattttagacataaaaccgtaaaaaccctagaagaaaacctaggcaacaccactcaggacatatgcatgtgcaaggacttcatgactaaaacaccaaaagcaatggcaacaaaagccaaaattgacaaatgggatctgattaaactaaagaggttctgcacagcaaaggaaactgccaacagagtgaacaggcaacctacagaatgggagaaaatttctgcaatctacccatctgacaaagggctaatatccagaatctacaaagaacttaaacaaatttacaagaaaaaaaacaaccccatcaaaaagtgggcgaaggatatgaacagacacttctcaaaagaagacatttatgcagccaagagacacatgaaaaaatgctcatcatcactggccatcagagaaatgcaaatcaaaaccacaatgagataccatctcacaccagttagaatggtgatcattagaaagtcaggaaacaataggttctggagaggatgtggagaaataagaacacttgtacactgttggtgggacagtaaactagttcaaccattgtggaagtcagtgtggcgattcctcaaggatctagaactagaaataccatttgacccagcaatcccattactgggtataaaggattgtaaatcatgctgctatcaagacacatgcacacatatgtttattgcggcactattcacaatagcaaagacttggaaccaacccgaatgtccatcagtgatagactggattaaagaaaatgtggcacatatacaccatggaatactatgcaaccataaaaaaggatgagttcatgtcctttgtagggacatggatgaagctggaaaccatcattctgagcaaactatcacaaggacaggaaaccaaacaccgcatgttctcactcataggtgggaattgaacaatgagaacacttggacacagggtggggaacatcactcacgggggcctgtcgtagggttgggggagtggggagggatagcattaggagaaatacctactgtaaatggcgagttaatgggtacagcacaccaacaaggcacatgtatacatatgtaacaaacctgcatgttgtatacatgtaccctacaacttaaagtataattagaaaaaaaaaaaaccatgctctcctccaattcactgggagacacatttgaaagtctggtctacgttctttctatgttcagagtttacaggtgatgtttggaacaaattgaatggggtgacatgggagaaaccatgggctgaaacacttgtttatgctggtagaagaggaactgtggggagaagacatattctatttttgaacatgtttaaaagaactgaatagtgtgcactctggcatatctagtggcagaatctctgtggaagtaaaatagtgatacctttaggtaaagcttctttgttatctaagtagttgtcacgaatgtagctgttagggatttgctcattacgagtacatgaacaggcagactaccatgtacgtttttatcatttaaatgcacccaggcagagatgcaggaggtcacttcacctggaaaatgctgggctttaaaagggtatctgaatttcagttaggatgatctcggaggcatctgttctggtattgagtagctttagtcattagaattggaattctgtaatagttcagctattatagttgtattaaagtaccaaattgacattatttgtgtctgtttctgtgtttagtgtttcatagaacttatgctttgagcacatttaagtgaacattgagccaaagatctgatgagcaatttgcatacttggttcaggtccattgaacaaaacagttatgtacaagctgtagtttctgtaaataaggctgtcagaaacgatgtatctcagtcacacaaaaatatatgggggactgcagaaagattatttaaatatataagacattttaatatatgggtggtacagatgaaaatacatatttctttatatgaggccagaggtaaattctattcccatcccccaaatgatggcccatttctattgaaatcaatatttaatcaatttaggtattgtcatacaaatattgtgagatttttaagaagccctgtgctaccttctttcccaggattcactcagacgagatggaatgacttaatctttgtgtttagtgccacttctggtcatattcctctatcacaattaaatgatatatcttcttttttgaatttacttcatctacaagcttcttaccattaactaccaccatgtttttcagtaaattactgtcttagaatttatctctcaaatatattaattcattagttaattcatccagcattcgactaatgactattatgaacctactatatttaacagtagccagcacacagatagtaattatcatgtgccaagtagtgctctaagagctttgcatgattaactaacttaatcctttgtcactcttgtgagatcaataccattatcatcctcattctacagatgagtagactgaggcactgtaagattgaatggccagttttcattcacagttctagtaaatggaaaagctgggaattaaactcaagcagataattcaaacagtgtaaatatttgtgtagtatgtgccaggcatatgtatgtttggtgacttgaatgttagtgttaaggcttacatgattatgccctcagctcatagacaaggagggaggcaaagtttttctgtgaagagccagatagtagatattttaggccctgcaggccatgtggtctctgtcacaactcttcaactctgctgttatagtgcaaaatcagctgtaccaaatcccaccaggcctgccttacaagagctcctgaaggaagcactaaatatggaaaggaaaagccggtaccagccactgcaaaaacataccaaaatataaagaccattgacactatgaagaaactgcatcaagtaatgggcaaaataaccagctagcatcatagtgacaggatcaaattcacacataacaatattaaccttaaatgtaaatgggctaaatgccccaattaaaagatacagactggcaaattggataaagagtcaagacccatcagtgtgctgtattcaggagacccatctcacttgcagagacacacataggctcaaaataaaggtatggaggaatatttaccaagcaaatggaagaagaaaaaaaagcagggattgcaatccttgtctgtgatcaaacagactttgaaccaacaaagattaaaataaacaaaggagggcattagataatggtaaagggatcaacataacaagaagaactaactatcctaaatatatatacccccaatacaggagcacccagatttataaagcctgttcttggagacctccaaagagacttacactcccacacaataatagtgggagactttaacaccccactgtcaacattagacagatcaatgagacagaaaattaacaagcatattcaggacttgaactcaactctggaccaagcagacctaatagacatctacagaaccctccatctctaatcaacagaatatacattcttctcagtgccacatcatacttactctaaaactgaccgtataattggaagtaaaacgctcctcagcaaacgcaaaagaacagaaataataaacagtctctcagaccacagttctatcaaattagaactcaggatcaagaaactcactcaaagctgcacaactacatggaaactgaataacctactcctgaatgactggtaaataatgaaattaaggcagaaataaaaaagttatttgaaaccaatgagaacaaagacacaacataccagaatctctgggacacagctaaagcagtgtttagagggaaatttatagcactaaatgcccacagaagaaagcaggaaacatctaaaatcgacaccctaacatcacaattaaaagaactagagaagcaagagcaaacaaattcaaaagctagtgcagaagaaaagaaataactaagatcagagcagaactgaaggagatagcgacacaaaaaaacccttcaaaaaatcagtgaatacaggagctggttttttgaaaagattaataaaatagatcactagccagagtaacaaagacgaaaagagagaagaatcaaatagacccaataaaacatgataaaggggatatcaccgctgatcccacagaaatagaaactaccatcagagaatactgtaaacacctctatgcaaataaactagaaaatcaagaagaaaaggataaattcctggacacatacaccctcccaagactaaaccaggaagaagtcgaatccctgaatagaccaataacaagttctgaaattgaggcagtaattaatagcctaccaaccaaagtaagtccaggaccagatggattcacagccgaattctaccagaggtacaaagaggagctggtaccattccttttgaaactattccaaacaatagaaaaagagggactcctccctaaatcattttatgagggcagcatcattctgatacaaaaacctggcagagacacaacaaaaaaagaaaatttcaggccagtattcctgatgaacatcagtgcaaaaatcctcaataaaatactggcaaactgaatccagcagcacatcaaaaagcttatccaccacgatcaagtcggctttatccctgggatctaaggctggttcagcagacaaaaatcaataaacgtaatccatcacataaacagaaccaatgacaaaagccatatgattatctcaatagatgcagaaaaggcctttgacaaaattcaacagcccttcatgctaaaaactctcaacaaactaggtattgatggaacgtatctcaaaataatagctatttatgacagacccacagccgatatcatactgaatgggcaaaagctggaagcattccctttgaaaactggcaaaagacaaggatgcccactctcaccactcctgttcaacatagcattggaagttctggccagggcaatcaggcaagagaaagaaataaagactattcacataggaagagaggaagtcaaattgtctgtttgcagatgaaatgattgtatatttagaaaacctcgtcgtcttagcccaaaaatctccttaagttgataagtaacttcagcaaagtctcaggatacaaaatcaatgtgcaaaaatcacaagcatccctatgcactgataatagccaaaccatgagtgaactcccattcacaattgctacaaagagaataaaatacctaggagtacaacttagaaggaatttgaaggaccgcttcaaggggaactacaaaccactgctcaaggaaatcaaagagaaacaaatggaaaaacattccatgctcatggataggaagaatcaatatcgtgaaaatggccatactgcccaaagtaatttatagattcagtgttatccccagcaagctgccattgactttcttcacagaattagaaaaaaaaactactttaaattttatatggaactaaaaaagcttgtatagccaagacaatcctaagcaaaaggaacaaagctggaggcatcacactgcctgatttcaaactatactacaaggctatggtaaccaaaacaggatggtaatggtaccaaaaaagagatatagaccaagagaacagaacagaggcttcagaaataacgccacacatgtacaaccatctgatctttgacaaacctgacaaaaacaagcaatggggaaaggattccctgtttaataaatggtattgggaaaactggctaaccatatggcagaaaactgaaactggaccccttccttacacattatacaaaaattaactcaagatggattaaagacttaaatgttagacctaaaatcatagaaaccctagaagaaaacttaggcaataccattcgggacataggcctgggcaaagacttcatgactaaaacagcaaaagcaatggcaagaaaagccaaaattgacaaatgggatctaattaaaccaaagagcttttgcacaacaaaggaaactgtcagagtgaacaggcaacctacagaatgggagaaaatttttgcaatctatccatctgacaaagggctaatatccagaatctacaaggaacttaaattaaaaagaaaaaaacaacccgatcaaaatgtgggtgacggatatgaacagacacttctcaaaagaagacatttatgcagccaacaaatatatgaaaaaattcatcatcactggtcattagagaaatgaaatcaaaaccacaatgagaaaccatctcacaccagttaaaatggcaatcattaaaaagtcaggaaacaaaagatgctgtgttctaaaagcattttatttgcaaaaataggtagaggagtggattttggcacatagtccatagtttcctgatcccctagtccattttagctaccagccagtacctcctatgtggaatttggatatcttcctggaaaactgttccaccttcagtgtttcaggatcatacatttctctctttggctggtagatcatcatctcctgttcttccatacttactgattctgctcctaatttttattactgcattcagatatttagtctataccaattttcatagtatattggttgctatctgcttttattctgaccctgattttagtgataatatttatcctatggtaattccctaccctctcacttctctatcttttctagcatctgaatagtcagcctgaattatccctttactttccttaccatctctcattcgtgaacaggcttaccaagtcagctagtggaagtcatgctatgctgccaaccgagggtatatagatttgatatttaatgacaactaaattctcttctatatcatcatatgcacctgaattgtatatattgtatattttctataacagctataaatagggtgaactttgaggaatctattagagagaatgaagtgtttcattattggtcttagtttccaaataagtgtcttgctttaaagcttgtaaactgcctgacaaaagactttgtcactgccttactaaaaagaacattatctaacgagagtctttctccttacctaaaaacgtctgttaccatattcttcattttccaattttctctcatttgtaaccatctttttcttagtgtggtttctctcttttcttctcctttcttctttccttccttctctcctccttctcattcatttttttttatgcttatatattttgtctacttctctgtcgctttttcctctgtcactaactgttcacatatgctctctcatatacatgcagatgctttatcatttgttctgacctcttcttccaaaattgatagtaaataattatttttctgactaattgttataaaaatggttataattatttaaggcttttcacattatttcttttctataaatattaataatgcatagctattacaataattattagtaacaatttttcattgcatggcacttagtggccatgcctgatttcttcatgaaactgaaataaagagtaataacaaatgtgtaaagaattgaaagatcacaattcagaaatatatctaagatggtatcaattagttgtaattattaatacaaatattacctatcctttcttcagaagtaagaatgtgatttcctgactctattttggatctatgaattgttacctactaatgagttatgaaaacagtttaatgaggtaagcccagtatttacaaaaaatggaaattgaagactaaaagacagtgtatcaggagttaggataattattgtttcttgaaacatacatgcacatgtacctatatttacacatagacatttctgtgggtgatggaaaatgtgtatctataggttatgattaatcaatgacatgtttattaataataaccatagtagtaactatgtattgagtgcttgtcactctgctaaagcactctatatgcaagtttgaatgtaatcacctcaacaatcttatggaataattattacaattattcttatttgttaaatgagaagcgttgagtacagagataacagagctagagagtgactgaagccagacctctctgctttagagcttcagctcttagtggctgtgtcttgcatttatactttcctcctttttttcaaggggataagaggcttttctagaaactgggaagcctaagtgtgtttcatggaaatactactaacttataggacactgagtcctcatttgcatgttctgttaggggtctcaatgaacattcctcctagcaacagctttaaatttcagactgagtgtttttctgtttaacagatcattagtttcaaaacttaccatttgtaaaggaatattccaagcattctaaatctctcttacattaaatgttatgtcataacaaatataaaacaaacatttgaaagtagtaaaaagaagtctgaatggaaatattcacaaccttttcttttagcgtaagtaaagtgaatgaatctcaaatagctagcattgaaccatcatttttcataatcacattatatgtgtgtggaatccttcttatgaaattttataaccttacaatttttgttttgttttagtaatcacagtatcacaggaattcaaggaatttatgctaaagtctcaagagcttaatattttaagtgagtttataaatctgctatacttcctaattccgtgatactgtgtatgaagggtttcacttgatgtttataagagaagtcattttttaagtgccagctttacagtataacattttaaaaatacgtttcctgagagacaaaaatgtttccattattttattgtttttagtcaatattttttgagcaccttctgtgtcaagcagtgtaaaaagtttggagatagcacggtgagaaagacataggtccttttcttaaagggcttacaaatcaactgcgtcataatgttctttaaagattcatgtgtattagaaggcttcttgccaagttgagaaatgttcaactctcttttctctatataagcatgatctcaaaggtccttttcatttataagcctggagccaggttttcttgtaggcagtctcaatcttatcttagtactttgtagctccaattactgttagacattgaactttcccttagaattatgttataactagggtctcatattggcccctctttgtagaagaaattttgctgacttcagaaaacagtggaaatacctcttgtattacatgttttttgatacaatgagaacttagggaatatattttggacacctgaaacagatatagaacaaagtatagatgaaatagattgattaaagtggaattttttgtttttgtttttgttttttttttttttgagatggagtctcgctctgtcgcccaggctggagtgcaatggtgcaatctcagctcactgcaagctctgcctcccgggttcactccattctcctgcctcagcctcccgaggtagctgagactacaggcacctgccaccacgcccggctaatttttttgtatttttagtagagacggggtttcactgtgtgagccaggatggtctcgatcttctaacctcgtgatccacctgcctcggcctcccaaagtgctgggattacaggcgtgagccaccgcgcctggcctaaagtggaaatttaaataactcacctatctatggttatttgggcatcaatctattaacctttatgtagatgagaatttgcttttcttgtaaaacatcaattaggattcattgaattactttgggactatcataaactttaatgaaggtgttctgtaggtcattgcacagtgaggccaacctgctcctttataggatgtagtcggcttgtagtatgatagccagccccattgccctagatttgttcacagaatggtaaataagagattacagttgccaccactggcaactgtaatttaaagagttagtaaaactctttcagtactaggtatgatcactgagggaaaggaggttttagatgtggggcacagtagcttttagacaaagatttgtatatttttataaaagaagggttgctgccatgcatactgttatttttttgtttttatattttgagtttttaacgtgggaacatatatatagacctttaataaaaatatttaaaatatgtgacttccttttgaatatcttcattagaaaaacaacctacattttccccctaactcctgccatgttaatgcaaatataaatataaaaatttgagttttatgaagtgaatagactcattggcttgtccttcgtgaaaaaaaattcctcatactgtctaaggatggtatataaattaggtcagtgaaatcagccaagatatactcatcaaatgtcatatcttttcaaagttaccagtcttcatctgtctctctttttctttccctacaacttagatagtaaaaggggaaaaatatccgtgatggtggctatctactctccaagaaaacataattaatgtaagaaagaatttaatattatgaagtattttactttgaaatttttacctttacatttaaattcatctagatataaatggtgagtgtttaaaacacattccaaagttatagtagaagttagtggagaatcatccagaatatctcagtttttgaaattaagattctgtcactaaaggaaaattgtttgtgatttttaccttgaagtgtccaaaatgtgccctccctcttgttctccgttgaggtattgtggagaagtactgtgatttactcagtgatgagagttgttcttgagagttcagaagaggagaccttaggggacagataagatacagctgatttttttttccattgccagcaatgtttggttattttaaaaaaggaatgataatactatatttaaaatgtatgtatcattaccagcctggatcactcattggacaaatatttattgaacttattaattgtaactagttacaaatccaagccggactttttgctttatggttactttttacatctcgttcataatgatgccttcagtaatttcagtctttttcctgggttttcagttgcagttaatcatgcttcgttgcattgtgccttgtttacattcaatagcatgtaaaacactgcaggaataaaaacaggggcatcatcttggaactgcttgcaagtaggctgggtctgtcatcttagagagaagaaaaaaagaaatataaactgaaacttagaggagcacggatgtgagtgttcactgaaagcaaatttaggatcttgggaaatataaatatgccaacttaaccatatttatttaacccaattgttttgattggtttcagttatccatatggcttatccatgtccatatgcttaaatttgccagactctcctttgctttgattatttaggtaggtctattggttttgtttttccttgctttttattgtattaatctcaattgttattgaatcaaagaccttcatgagatggtatgcattcaactataacattcaataggcctctaaatactgtgttctaaaactcttgctggttaaataaaataccatttttatagttggaagtgaaataggaatattttataatattacaatcagaatgctctttctagtttttatggggagtttttagcagaggcctcgagaactttcatttgtgccctttttatcttgtcttacagaacaaagcaaaagtgcattttttggctatagattagtctaaaactagtattttctatccaatgatggcgtaattgttcagtctaaaactaggattttctatccaatgatggcgtaattgttcagtctaaaactaggattttctatccaatgatagcaaaattgttttgtccaaaactaggatttttttatccaatgatagcagaattgttttgtctaaaactaggattttctatccaatgattgcagaattgttcgcatgctttaataatttcttaacatttttttgaagaggtgagctattgatcttctcaatgtatattaaaaaacctatgtatatctgctttctagttttaaagaagcaacacttctttcttctatgaggggaaaataaacaggaagcatgtgcaaacttttttaaaagaagagagaagcaatatttttatacttaacagtattaaaggctatggctgcgttactttatgtttcattaaatggggttgtgagggtctacttgtagaaaatgatttttatatcattttctagatgatagaaatggttgtgaggttctactcgtagaaaatgaaatataacatcctttatatttccatgagaatgcaactgtgaactaccatagcaaagtagaatcctgaggctttcacagtaattggaggcattctttcttttctcattcatccagtttaataaaaatttgtggctaagatatttttgtattttgcattttgtattttattctttattaggcacatgtggtgtttaagcttctgacttccagtgaagggaggattaggtgatacaatacctgtatcctagcagtcttgataaactgtgtatcttagcaaagtagaaatttttctgctaactctacttttagaagtcataaatcataaatgtcaaactcccaaatcagtatttaaaaatttggtaaagattcagttcattctcttttatttattctatctctgcactaatgagtcttcaaatcctgagtattaaccttggtacttcaggatcttttgccattggagtgggtttcaattatgtttttatatagtgcttattatgtaaggaactttcgatactttttgtgaggattttgatacttgttaaacacatgtttaaacaaactggaagtgattacatattacttaacagatatatctatttcattgtaatacctggaacaattttgtcagcattccaatttattattaatgtaagacttactttatcctactgatgagcattttgtgtcccttttaaccaattttatgttatcatacactgttgaggtattagtctctagggcaagggcaaaatgccaccagtttctttgcatagcaagagcgatgtttaccccattacaaattctgagctctccaaactattccgacctctgttccaaagttgcttccacattttcgggtatctttacggcaacaccacattcctggtaccaacttactgtattagttcattctcacactgctaataaagacatacctgagactgggtaatttataaatgaaagaggtttaattgacatgcggtaccacatggttcacaatcctggcagaaggcaaaggaggaacaaagtcgtcacgtcttaaatggtggcaggcaaagagagtgtgtgcaggggagcttccctttataaaaccatcagctctcatgagagttactatcatgataacagcatggaaaagacctaccccatgataaaattaattcccacaataggtgggaattatgggagtgacaattcaagataagatttgggtggggacacagccaaaccatatcagctgatgatgtctttctttttttgagaaggagtcttcctctattgccaggctggagtgcagtggcgtgatctcggctcactgcaacctccgcctcttgggttcaagtgattcccctgcctcagcctcctgagtagatggggctacaggcatgcaccaccacggccagctaactttttgtattttagtagagatggggtttcaccattttagccaggatggtgtcgatctcctgaccttgtggtccgcccgccttggcctcccaaagtgctggaattacaggcgtgagccaccacacctggccaatgtctaccttttttatcttgaacattgaactaattataatttcactggtcttattttcagttttgaatcaaaatgaaaagataattataagttatagcacatggatagtatttaccttagtaaatttaaagagtatttcaaataaaagccaaagtcataaataattaaacttctgtccttttatttaatgaatgatacctgcataattctgcaactcaagcaaacataataaatatgtcagcaaaatgaatgagaaaagattatagagataacaggttaactgtggaatgaagaaattataaaactaaattaacttaaaatgtatacagaagaatatttatcactgaactttctgtcattgcctgtgctttttttctgtcttgaataataatttttgaagtgctgtcacctgtagtcttcaagcatatatgtttagaaaaatgtcatattaatggaaatgaatgttaccttatattgagattttccaatactggacatcagaacttcctgaagatgctgggaagcattttgatgtatacctggaggctgtatttttcctccagaggcttattttttactgactactatatttctttcccttgctctttcttttcctctattttttaactttttttattttttgaagtcattcttttttgttactatactgcatcatccttgttaataaattattgagactatctttctttccgttctcttttccacccagtctcatgtgtgcctgtgagttaaatgctaggtactaataaaggagatgtgaaagacttgtactagtagggctgatggtactataacctgtgatttgtgcctcttctgagcctgtgagacctgccttgtgagacccacttcgccatgttagtatcaggatatttcccagagaataacccatcattctgattaggctttcctcatctgcttaaagatgtgactgccctgatcaaatattaccttatagtttcctacaaacttctaatttctaatcaggtcacacttttactctctggaagagtgccagttgagatactttgtgcctagtagtatttggttctccagaaatgacagatgatcaatggaggtaaaagaagccacttggattctgcaaaatgtttacacactcaggttgctcatttctgttttttcccttcaccaagcttcacccatttcttcctccagccaaaagtaatcctgtcttaatgtcatctcgtgtgtatttatgtgtgtgtgtgtgtgtatatgatctcctccagtgtgactgtgttaagacagtctttggatggtatctgactactgtgttgttacataaaattaggtggttgttatacttgattacttaattgggtgccgccattatctttatttgaactcaccaaatagcccattttcttttcagttttggtgccgtaacaaaaagtgagagaaaacatttctccaaaataatcaacatacttatcactattttgtcttcttaaagcattggtaaacagatgtgtttttatttttttaacttatggaatgggttgtttttgattaatttcttcaaagtttgtatgatttttttgcacattttatctactatcagtgttatttggaatgattaaaatgttagcaccttagataatgtaatagatgaagatggtatttttaatgtttaagctagctatttgaaactttcttttaaaaatacactaataactattatgttaaaaatataacaactgaaggaaattaaagaattggaaagaatagtattctttatgagtatttaatttaaagtatttatttaagtctgttatctaactatgtggaatattgtaaaatacaggtatctttcaatatgccaaaacaacaacaacaacaattccaaatccagataaattaaggaccattttctaattttggaaaaaactaaatttctcctaactttattttctcaggaaatggagtctttcctatataaattttataaaggtaaaggcaataatgttcttttgagcttttggagataagcattatatagtagcaaataaagtgaagatttatgctagaacctaggaggtagaggtcgcagtgagctgagattgcgccattgcactccagcttgggtgaagggacaagactgtctcaaaaaaaaaaaaaaaagtgaagatttatatttcatgagatttaaatttattaatacagcacagacatagattataagcaataattaagcttttaaatggccacattaatgtcagaaattgaggctacatttatttttcccttcagcttttgtctgcttccaattccttttgctacctatattccatatataaactggtactttttaactctgtatcccctctctccctcccaccctacaagcccatctaagttttgctttataactgtgcctggagaatagcaataggtaattttaattaaaacagtacggaagttttccataggggactacatttaatagaattgttttggctgtttactttgaatattggattaagatttatttgttttcaaattgctaaactgatattaactctattattcttagcctgaaatatgctctctaccgcatatttcttttttctttttttgagatggagcttcacactgttacccaggctggagggcagtggcgcgatcttggctcactgcagcctctgcctcccaggttcacatgattctcttgcctcagcctcctgagtagctgggactacaggtgtgcaccaccacgcccggctaatttttgtatttttagtagagacagggtttcaccatgttggccaggctggtcttgaactcctgacctcaagtgatcctcctgctcagcctcccaaagtgctgggaatacaggcatgagccaccatgcctggcctctactggatatttctatgtaagtctcttacctgacacatttgaaaccacatctttgtcttaaaatcagaacttcggtggacttacctccttttttattcactaaggctcactctgtggagctatttttaacccacgacttccttatttttttttcatccttatgggtatgatcaactattgtcaagtttttctttacagtgttttcatattgttctcatccatttttacttcctacctaaactaatctcttcttgatgctaattctgtcctatttcagctgttctctgagttgtctgcttctgattattttccagttacatttatgctgcacgttaccttttagattcatttgtctatgttcttgttctctcagttcagaagctttgcaggtgtaaacatttcctagagcgtgacatccagcttccttaggctttaagaagtgtttacaatttatatttgaaatttctttcccatccttactcatatatgtgtgtcttcacaggtagactgagcataaagtctttggcttctctctctttatgttggtgcttcgtatagcaccttgcatgttgtgcgccgttggagattgtgttgaagaagagaatctctttctaaagaaaatatttaaattgatgcatattagttgtacatgtttatgtggtacatgtgatatttgatatatgcctacagtgtgtcatgatccaatcagagtatttagcatatccattgtctcaaacatgtatcatttctctgtgttgggaacacttcagatcttctgttttgaaatatatattattgttaactgtagttacactactgtgctattgaatactaaaacttattctttctatctaactttatgtttgtacccattaaccagcctctcttcatctgcctgtgccatagccttcccagcctctggttactatccttctactcactacctccatgagatcagcattcctagctcttgtaatctctgttacttgtacatttctgtttttctgcctgcccgcacttctttctgtgtgtctggcagcctgcctgtctgcctgcttatgcccatttatttactgtgacttcatgttctacgttttccatttgaggaaaattggtctgatgtctactggctacttcaatttgatccccccctcctttttttcggtgagcacataaacaagttttttttttcttcaatgtttacttttcttctaaaatttaaagacttctacaaccagttttttttttttttccagaatatcattgcattgcttccttgagtcccttatagcatgggagctctctgcatgttgtatctcaagggaaattatccttgtagtgtatacagtatttttaaagtgtttccgtggaaagcagatggactctttattttgtgtttctctgtatttctgattatccatgcagtggaagtgattaattaatatagataatggcaagattgtcacagaaccattgacttttacattcaggtaacttattcgtaatactcttttggcagttaactgccaccaagtggtggttgtatgccatagctctgtaacatgaacagtgtttccaataaactgtccaccgcaaaacccgtaagtttctatatgttaatatccagcatcttaatgaaaaattacacttagcattgtatagtgaattgaaaaccagtatttttcaggaaacattaaaaaagtaaacttttttctgtattttttgttttttgtttttgttttttttggtttgtttttgttgtatctttttctttgtttttttttaatttggctttttttcatattttttaaaaagtaaacattttgtgtttcaaagattgctatcaagaaagtgaaaggaaacccagagaatgggaagaaatatttgccaatcatatttgccaatcttatatctgataaaagacttatatctagaacatataaagaattcttacagctcaataataagaaaaatgatccaatttagaaacgaacaagggatctgaatagacttattccagggaagatatacaaatggccaacatgcacatgaaaagatgcctgacatcattagtcatcagggaaatgcaaatcaaaacccaaatgagataccacctcacaccctctaagatggctagagtaaaaaattcagatactagcaagtgttggggtggatatggagaaagcagaaccctcatataccgctcgtgggaatgcaacattgtgcaataaatttggaaaacagtctggcaattcctcaaattgttaaaaatagagttaccatttgacccagctatttccactcctaggtatgtacccaagagaaatgaagatatatgtccaaacaaaacttgtactcaaatgttcatagctgtgttacttataatagcccaaaggtagaaacaacccaaacgtccagtaatgggtggatgaatggaaaaaacaatggctaaagaatatgttccattcatataatagaaaattacttggtcagaaaaaggaatgatgtattgatacatgctgtgacattgctgaaccttgaaaatattaagttaaatgaaggaatgcagacacagaagaacatattatggttccattcatatgaaatgtccagaacaggcacatctgtagagatacagaatatattagtagatgctggagactagggcaataggggagacttaccaaagtgtagggtttctttttaggatgatgaaaatattctaaaattggtcatgatggttgcacaactctgtgatatactaaaaccattaattgtacaatttaaatgtattaattttatggcatgtgagttatatttcaataaggtgttacccccaaaaatagacattaaggtgtaatttattatattttaatctttattattccatcaatgtaatatttgtcttgattaggatgttcacttttttatgagctttaacttatagcaaaatttattttatattctgtcctcacttctggatatgttcattttgttcatgtgctataggccagtggttctcaaatttagcatgcatcagaattacctggagggccctagcccagcattttggattcagtgggtctgggataggatttaagaattaacattcctaacaggtttgtcttacttccttcttcttttccttcctccctcccttctccccctcccttattcacttgcctcctctctactctactgccctgcccttccctcccctcccctccctccctccctcctttccttccttcttcccccacgttttttcttttctttctctttctctctttccctttcccttttcctttcctttccttttcttttttcttttcttctcttttttcttttttttctctttctcttctcttttcttttctctcttctcttctcttttttcttttctttctctcctccctcctttgcctccctctggtctggtttgataaccagtggcttaggtcttaggggaacatttttgttttagcacaacttttattagattctgagataatggccttcatagatttagacttcagccctactaaagtctcatatagcatcaattcttgtcttttaccagtgagaacatagctttttaatattatatttccttttgtgaatacttcccttctcctctctgcatgataagtttgatgtttaagtgaaagcttttgtttactgggttttaattttgattttctttaacatttacggcaactgcttctttgaaaatatccccttagaaagcttagaaattctgtaatactacagaaaataaaatattttgaacagaaaaaagttaatttctttaaaaagtgatacatttatgaagctaggcaaaaatgtcagttgttaccatattttggtgtacttcgctgtttttagtacttattattttaattcccagatcaaagagggatctttgtttattttaattagaacactcttgtttacaatatttttactagggtgagctttatgtggaagagtgtgacaagctatcattattagcattaaattcttaattaaagacactgttttctgaagaaatttgtcttcttgatttaaaacaaacaagcaaagtgtttagtgaaaaggacatatccttaggattatgtcactataaagttcttaagcctcttgtccaatgttgcaaattaataatgttcaaaatgcttattaggttaaaaaatgagtgagctccatgagctgaggagctagcagattgccgggattacaaagacaacgagacaggaccctttccttagcaggatttacaatctgtaagtgtgtgttataaatcaatcagtgaggatttatgtatcatccgggattttaccaatgtactgtgcaggatgcttgaaaggaaatttgagaggcagataaggaaggctgtgcccttgagagtttttaacctgtactgaagatgaaacccagcacaagaaataaccacctgtatgcgtgtcgtattttgtgtggtggggagtatgcatgctgctgcaattctaaaagggactttagggattgagcagagatctgcgtggatgcacacacgtcaggagttggctgaaaaactgctgcaggcaaaaatgccatcgctgataataaattgtaaggagatcaaaagtgatgtttcaaaaaggaaaaaaaaaaaaaacaccagggcatagaattctttatttattatgctggtgtggaagggaacagctgttatctttcaaactgaagaatcctgactgacactgaccagtttagtgcctctctcttctactgtattatagaggatgttttttcttgggctttggctggcatgacagtgttcaaggatccttctggaaaagtagaagaacctggaagccaaaaacccagccaggttatacttaaaatatttcacaatgttgaagtaaagtatgccactaggattaagaattctactttatgagcagaggcagaaatgtaatgaaaaagattgtaatatagagaatattagaagcaacctactaccttggacttatctgccacatttgagtgttagaacagtctcgagtcctaataaccgtggaaaatttgattacaaacatccatttttagccaaagaattggattgtctgtccttcatgtaacagtaacagttacattggaagacttgtatggagaatgtcatgtagcacagttaggcactatctcctgaaaacagtttgaatttaacctaaaacttttttactcattatagttgttttatgtatgtgtattgaattgcagtcaaatattgtaattattatatcagtatagtcttgcctaggccttatgacttttaattaatgagaacatgcttccttgacttagccagatttttaaattgaggagagatgcttgctagggtgaattagccaacagtttataaatacgatggatagataatacctattcacatttttttaccttattgcaaaaaatttaataaggaaacttgaatcagtcaatttaaactgttttgtaacactgctgatttaaacgtcttcaaaatattttcctcatctatagagactatgtgattgtatcagacccttatatcacatgtgaaaatatttccaaatacataaaaatacataaatgtaaaaaagaaaaacaaaaatttttgaaggcaatcaggatatatatgaatgtaggattagggaaggtctttctcatctaggattggaaacctagaagtttaaaagctaggagtatttgactgtttaaaagttagtacctgggtgtggtggaacacaactgtagtcccagctacttgagaggttgaggtgggaggatcacttgagcccaggaggttgaggctgcagggagccatgattacagcactacactctagcctgggtgacagcgagatcctatctcaaaaaaaaaaaaaaggtacattttcgttggcataaaataccatagtgttagtagaaaaacaatagatatggaattataagtataaacaaagtaaatgcccaatcatcattgaatagttatagattatggcatatatgtgtcaaagaatatgatgccattttgaaaaaaaagaattagagctgcactcattgccttggaatttcagtgaggtattgagtgaggagaaaagtaggatgcagaaaagttcccattatttgatgtgattttaataaaataagtgaagtaaacaaatccacatatacatatttactgtgtatgggtgaaaatttatttgtctgtttatcaacatggagaagcagggatcctataatgtgtctcttagacgggttggggaagggaataaggtgtgagcatagagaagagagagggagagagcaagcgaaaaacaaaaactgcacaaatagcataaataaaagcctttatgatatgaacacatttatacatataagatttgagataattatataagctgtgtatgtgtagttaaaattgaagacaattaaaaataatgtgaaagagtgggagctgatatgtataaaaacagaattgactgtagacatctcctttggttataggcagaactataataaggttttgagaaatacatatttgataactataaaaaagcttttctcactactgttttttgtctaatggttggtaaacctttttatattgcaatcttctgtgttgctctgaatctccaatttatttgagaaaaatgacattcagaaatgcttaatatagtattcaattattatttcaataaacatatggataacacttatttatgacatagataagtcctgcatacagtggcacacagaggcgaggtatataatttgcctgagggagatcagggaaggcttccaggaggatttagagaatgcatgctaggtggggggcagcaagaaagaaagtgcagaatggagaaagagtatatatttctgttttaaactcaatggaaaaaacaacaaagcaatagattgtaaatggaaattaattgctgcattttattgagtctaagagactctatcagttttatgatgcatgagtattttatgtaccacaggaaagaaaaacttgcttattaaacttttatatgtatgtaaatatatatatatgtatatacatataaactattttatatatgtaaatatatatgtatatacatatagtttaataagcaagtttttcttatatatgtatattcatatatatgtgtgtgtgtacatataatttttttgtgtgtgtgtgagacagagcttcgctcttattgcccaggctggagtgcaatggaacaacctcggctcactgcaacctccatctcccgggttcaagtgattctcctgcctcaccctcccgagtagctgggattacaggcatgcaccaccactctgggcaaattttgtatttttaatagagacagggtttctccatgttggtcaggctggtctcgaactcctgacctcaggtgatccacccacctcagcctcccaaagtgctgggattagagccatgagccactgtgcccggcctatttattatattaacagttattatctcacagattctctggggcaagaattcaagagctagttatcataggtggttcaggcttagtatcgcttatgaaattgtagtcaagatgttggttggtgctgtggtcatctgaaggatttcctggggctggagaatgtagtatcaagatggcatactcacattgttgatgctgatgggagaatcccttgtcccccatggagatggttgactactcttacagcatggtgattgtctttccccagagtaaatgatccaagagaacaagtgagaaagattctgaaatgtcttttatgacctagtttccaaaatcacatttcattatttctgtcatatttgttagaagtgagttgctaagtcaagccaactttcaagggtaagaaaattagactctacccttctacgtgtcaaatgaggaaaaacaaggaatttgtggacatatttgaaaccacagcactcttaaagatataagtgaaaaaaatggtgaaggatattttttaaaactttgcatttattgtgtaactcttctgaatcactttgcaagagagttgttgatgttcatgtttttcaacataatattgtcttctgtgccactaataacactggcgatgaagcatttttaaacgaatgatagagtgttgacttccagatctttcttcaagctgctgtcatcaaagatgcatgtttcaatgctattgttttcataatcttaccatatgagtcaatggaaaggattcagtgaaatatgaatattcatttaccttcctaagatggttctcaaacggcttattgattgaaatgttgaaaagtttcctggcccagatacgtcacccagtttttgcatatatggataatgacactatatcatgattttcatcgggccaacaaatgtttttgagacatatcctattttcagattgttaaaatataaaaagaacatgcttgttattactcagtgatgtagatagctattctttttgttggctcagtactccccctttgttggcaaaaatacctctcctctctcattctaaccatgtagttctagtggaagctgccagtcatcatagcccagacattggctgcagtggtggattccctgagctgtgtccaggtcgatggtccccctggccactgagattggctcagggatggacacatgactcagtcctatctgtgttctttggattttatttttaaactggaactagccaggtaaagtgcttttctggcattgtttaggaaatatgaaagaaatttcagtttcccttgcagacgtgttctggcttggagtgacaggggcagaacctgcagaaagccatgatgctaacaaggacttttataaataaattcacctgctttgcttacggtagttcaagttgggatcctgttctgacccattaaaattggtaaactataatttcattatctatgtgttttgcctttgtatacaataaaacataaaaatcacatcagccttgagggctgatgtgatttttattttatgactttgtcgccaaccctattttgtccattagcttttgttttctttaactgaagatacttttactactatggttttcaaaaacatcactcttgtagttgggaaatacataaccttttattaataatataacttttagtctaggcatggtggttcacagttataatctcagcattttgggaggccagatggatcagttgagcccaggagttcaagaccagcctaggtaacatggcgagatcccatctctgcaaaaaaaattttaaaaatgaactgagcatggtgttctgttcctgcagtgtcagctactcgggaggctgaggtgggaggatcacttgaacccaggaggttgaggctgcagtgagccattactgtaccactgcactccagcttgggcgatagagactctgtctcaaaaaatatatgtatatatacataaaactgttagattcaccaataagtgactttttgttgcataattaatacaaagggaagataactaggaacttgttagctatccaaaatgtttcttcaggaaaataacagactttagaaattgcctaatgttgttcctatggtttacctttggcttagacaaaatttatttgactaagaagtagtatcaatttgtaatgaagaaaatggaagtcttagcaataccggaagtgtgaagtactgaacaattcaatttatacgtgggacatttgttacaccaggcttcatgccactgaatatggctgctcaagagaatagtcatgttagatgtaaattttaatagtaatatttatatactgtttttacaaagtttacttgaacattaaaaactaggcgttgctgaaaaattactgttttttaggtcttttttgatttctttcatcagcattttggtagcttttaccatatatttttaaaagtaccgagtttttaatgtgtaattttcaatgtttagataagctctgtgtaaacagtatataaatattactattaaaatttgtatctaacatgactcagcattttggtaatttttaccatatatttttaaaaaatggtgtttaaaatagtattttaaataatatatggtaaaaattaccaaaatgctgatgaacgatggtattttaaataccataaaatgatatttaaaaaatatagtacatatattttaatgtttttgcctaagtattctttttctttaaagtgatcataaatgacattgtttttaaaattttttttccacatgttcattattggtagatagaaatgtgattgatttttgtatgggggtaaagagatcctaatttgaaaattaacactatttgttcccatagaaataatgaaccacacaaaaggcaatgttcttatttaggaaaaatcttcaatgtttttggtaactttttttaggttttatataatgttcagctatagcatacaaatcatttaaaatataactttattttagcagaaaatttttgaaagaaatattcatcgagagaaaataattttataaggaattgaatgatccatgatacataatttttggaatatattgataattcaatatgcagaaagaatcatttaagtttaattttttttaagactaaattagttttgattatctgcgtagttttcaaaagtcagcttgatagccttgcctctaaaaatcactcagtgtatctccttctaaatagacatatattaaacgtaatgatttggacatctaattaatgacatttaaaatgaattatacatattatctttgctcattcaatcatctatttaaaaatatataataggtaaatttagtagtcagcacacacattcatatttgaagtcttacagtagatttatgtgttatttttctcagtaacctaaggtttgctagtaactttgttatcctctgataaaacctgcctttattagttaatgttgactttgctgcctttgcacagtattcactaccactctttatgggttgcagagttacgaccaccataaataaagacagcatgaagagaaggaagagatagaatagacaatttattttcatgcatttttggctgccatctaaatcacgcttgtcagaggaaagtggagtttaatggtcatccttaacaagtttaggaaaaaaatgtgcatttttactccttccatgttgtgttttatggttatatcacatttggttcagaataatgatgattcaataatgacattttattattcaagcttgatgaataggattgggaagggttgtttattttatccttccaattccctgtaactaacagtttgacaagagtaagagacactgactgatgctgtacagagactgtttaatgttttttaatgaagtgctggagttaaaatggaaatatctctagcctaattcagaccctggcaggtaaggcttgttccttctagtgtgtttattggagctctgtccagcttcatttcacatgtgtgttttggggattagatatgcaaatacatatgtgtatattaatataatacatatataaacatgtttgcatatattcaaaaacattttacagtgctttaattttgttttaccagcaaaattcttttcctcaagtgaaatcatagataagaaatcctctgggagtttccaggacaggaaacatacaaatggagctcctctggctgccaggcctccttactgctctgctgcaccctccgctgatctgttccagtgcatgtaaatagcgaggattcttgctaatccctcctttgctattccttagattatttcttccctacgtagtaggcaagtcagtaacgaccctttgattacaaggaagttttaaaatggcccaatgacatattttaaccagtttggatggaatgagcccatagctcctttattttgtttagttcatgaactgatatcactgtaagccagacgactgtttggagggaaagatcatttttaaagaagtgagaattttaatatatacattggaaatggaatcaatccaaagtaaatatacagaattccattatgcctctaattttgctatttgttagccactttccttatgttgcctgtatagagtgataaaagtgagaggtggccaaattgaattgttctgttatttaacattagggaattacacattactctgctagtaacttttatgggatatttatgtatatgtgtatttatttatttcagagaccaggtcatgctcttgctcaggctggagggcagtggtgtgatcatggttcagcatggctttgaactcctaggctcaagtgatcctcacgctgtagcctcccaagtagctaggacctacaactggtgtgcaccaatatgtgtggctaatttttaaattttaatttttgtagcgatggagtcttgctttgtggcccaggttggtctccacctcctgtcttcaagtgatcctcctgcttcagcctcccattgctggcgttacaggtgtgagccactgtggcaggcctgaaatcaggaataaaaaatgcagcacaactagaattttttttcaattatatgaggtttgaacaattattcttggcttaaaacttttaaatgattttttatatagataaaattatgatcatttcccctttgacaattggagtaaaatattctgcaattggaatgtcatgctaatgaggcatgtcttttggccaaaataggatataatgaaacatgctttatgtagggaccagccccacagggtcggtgggtctctccctgtgtgcggcgacgagagagtgtagaaatagagacacaagacagagataaaagaaaaggcagctgggcccaggggaccactaccaccaatgcacggagaccggtagtggccccgaatgtctggctgcactgttatttattggatacaaggcaaaaggggcagggtaaagagtgtgagtcatctccagtgataggtaaggtcacgtgggtcaggtgtccactggacagggggcccttccctgcctggcagccgaggcagagagggagaggagacagagagaaagacagcttatgctattatttctgcatatcagggactattagtactttcactaatttactactgctatctggaaggcagagccaggtgtacaggatggaacatgaaggcggactaggagtgtgaccactgaagcacagcatcacagggagacggttaggcctccagataactgcgggcaaacctgactgacgtcaggccctccacaagaggtagaggagcagaatcttctctgaactcccctggggaaagggagactccctttcctggtctgctaagtagcgggtgttgttccttgacacttttcgctactgctagaccacagtccgcctggcaacgggcgtcttcccagacgctggcgtcaccgctagaccaaggagccctctggtggccctgtccgggcataacagaaggctcgcactcttgtcttctggtcacaccttactatgtcccctcagctcctatctctgtatggcctggttccttggctatgattatagagcaaggattattataatattggaataaaaagtaattgctacaaactaatgattaatgatatgcatatataatcatatctaagatctatatctggtataactattcttgttttatattttattatactggaacagctcatgtcctctgtctcttgccttggcgcctgggtggctttccacccacactttatgcttcaacagactgtggacagttgtctctccatcatccttctgaaggggccactcttggcatcctggaagcgtgttaatgccgaatgtccttgatatgtcatttttttgtttgtttgtttttgttttgttttgttttgtttttgagacggagttttgctcttgttgcccaggctggagtgcaatggtgcaacctccgcctcccaggttcaagcaattctcctgcctcagccttccgagtagctgggattacaggcatgtgccaccacgcccggctaattttgtatttttagtagagatggggtttctccatattggtcaggctggttgtgaactcccgacctcaggtgatctgcctgcctcagcctcccaaagtgctgggattacaggcgtgagccactgcgccttgcctgatatgtgatttttaatcatttgaacaagactgttattctgggatcaaaagattttattatgtttttaagtgttattataaagaagatgtagttatcactgctgcaatcctagtgggatttgtacacattggtgtatagcttggtataaaatttgagtttataatggaaataaatatttaaaaagttaacacttaaaaaagaagttaagtggtatgagagtttttataatgaaaccttttagacatttagagaatagcaccacatccccattgaaaatttaagtgaaagagagagagagaatgtgtgtgtgtgtgtgtgtgtgtgtgtgtgtgtgcacatgcctaccagttttttactatggagtctctgttttcttaagttataaatagaaacaacaaaaatatcttattagattactgtgaggataaaataatatctaaactggaaggttgtaattacttgataaatggtagccattattagaattgttattattaagaacaatgtacagtttctatcttttcagcatcttaaggaatttcataaatgtcatatacctatggtcccatgaacttatcctccttcttatgtttaaggactataattagattatttccttaacttgattcagtattacgtttgttctttcttaagagcaaaaccgaaagaaaaacacaaatttaaaaacaattttatcaaaattgcaaatgcagttaagaacttcgacaaaacaataaaaaagaagcacccaggggaaataataataatgtctataattatattatccagaaatatcctctgctaacaccttggaccatttctttctagttttgtgtgcataggcatgtgatcttatttactaaaatggattcatattgtagatatagtagcatttcagatgtttaatgatgatgatggtgttgatggtggcagtgacaatgatagttaacaatttatcatgtttactatgtgtcagtcactgtgctgagaccttttcatagattgactcatttaactcttaccctgagaagcaggtgctcttattatcttcatgtaacagatgaggaagttgagattaatgatttgctcaagatcacatagcaagtcacatgtgctcaaggtaacacagccagtggcagagtgggcttaacccctaatttatacgtatctgctcaattaaactttctattaagtcattagtgattcatctccttttatcatatgaaaagttaatgattacaacatataatatagtaatttgttttggaaaatgccctctttcaaacactgttagtgtttcacaaaactttaaaaaaaaaaaaacttactaggggccgggcgcagtggctcacacctgtaatcccaacactttgggaggctgaggtgggtggatcacctgaggttgggagttttcaccagcctggccagcgtggtgaaaccctgtctctacttaaaaaaaaaaaattagccaggtgtggtggcgcgcgactgtaatcccagctactcagttgcagtgagctgagattgtgccattgcactccagcctgggcaaaaagagtgaaactccatctcaaaaacaaacaaacaaaacacacacacacacacacacacacacatcttactagggaaaacagactgtaaacttttatctagttatattgttgtttgtaatgtgacaaaacattttttcaggctttgatttggatcttagtgcttaaatttgcagcagtggtttgcgcttgggattcaacacattcagcatccctaagagcttaaacgtatgctctgcatcccaaaacagttccaggaaaacaaatgtcttaagggtctcttatgttttagattatctcagggactcagttaaccatttacactttattaaagataatttactgagtcttaactaaagtttaagatgaactacagtttaagattaataatatttgatgttcgtgcagtcagttatatgtcacatttttattaggatgcaatgaccaacggtaaaatatttagttaatatttaaaacatcggttaatatttattcagttagttaatatccactaataaatgttaaaatatcagttaatatttagagaatatttacagcttgcccaaggtgtaaactttcataaatatattttacccaaagtactgtgcattttatgtactgcttgactacaacatcgtttgctttggtatgtcttgatattattctatgaataccttttaaaaaacatagcatttgaatcatttttttatgtttattcttgacatcatgtaaagcacacaggcttatggaagggcagggtagaatgaggtagggtttttcagtttgtttttaaatatgttttttgtagttatgtttaatgatggtatagtgtgttagacttacctttttttttagtaaaaattagttacagatttcattgtcagagttcacaatctttttccttagaagggagtgctcagtgaatggttaaatctgtgtgaatacataaaagcagtgagcacgtttttgtttttaaatggagagaatagtttaatgagcctccatcttcaacatttgctaactcatggccaattttgcttgatattacccttttctactggagtatttgcaagcaaatgtgagatacgtcattttaatccataaataaggaaataattgaaaaaatattcctagtgtttgttttatgtggttgcacttaatattaccataatattcttaagcttattgtattgaaaaatgctggagggcctcatttggtatgcatgaatcaagccagctgcccaagaaagatgtgaaaacagatggaatttttatgtgttttagatgttgtgatcacgtgtgccaccaatccttcattctgcttttcaggatggaaacattaagtcatccttgatgcttcctttttttccttctcgccttttaaatatatcttcaaactttatcgatttttattccttaaatgtctctttaattgacttttaactgtgtatctccattgctgccacttacttactgactatgataagtgtcttcaggccagtcttggtggctcatgcctgttatcccagcactttgggaggctgaggcaggtggatcacctggggtcaggagttcaagaccagcctgaccaatatggtgaaaccccgtctctactaaaattacaaaaattagtcgggtgtggtggtgtggtggtgcatgcctgtaatcccagctactcaggaggctgaggcatgagaattgcttgaatccgggaggcggaggttgcagtgagccaagattgcgccattgcactccagcctgggtgacagagcaagactctatctcaaaaaaaaaaaaaaaaaaaaaaaaaaaagaaattataagtgtcttcagtgatttttttctgattacattttccctcctgttgtggttaggaagggcaatttctcggaatctcagatctctcattctgagagattgcccttcctctcaccatatctttgtagtaaagacagtgtttaattcatcccacttacatttctgttcttatattcagtttattcctcaagatgaccctttcataaccacatctttttctgtttaccaacattaacctttaggctgctgtcctgaatgccctttctgtgttttgggtcatactcattcttgcctctgctctgcctgccctctcctcagtttataaatctgtcctctttttgatctatagtctacctttccatcaaagtccagcatattttcttcctttcctgtcaaatccatcttgatgactccaagctacgcgtatctttcccttttcagaatttccacaagtgtgaatagttgatgctgtgaaatgggatctttggttttgcttttgtcttgtattatcttccagttgttgatggatttttgtgtctaatttggataaataccttcttgggtgcagggacttttcaaaacaaagttggccatcttttctttgttgcattttcttttgatcattaacgccagttgataacctttcatttcttatacaggtgaacaaagaaggagaggagttaatatccttacatagttctcatcctcatccttacatagttctcatcctcatcttcatcctcatcctcatcaccatacctctcctatcaatgaaggggctggtgttatgagtgttgtgagtggtgagtgctcctcctcaacctttacacccaagtcttcttattcaagcagaaggaaaaaaggaggctctgagattgattaaacccctttgaaaagactttttgtaataataggctcattaaatgagcaaataagctttagattttctggcacaggaaaaaaaggggaaggaggggaaatgaaaagtaaggatagtgctaggcgtggtggctcacacctgtaatcccagcacgttgagaggctgaggtgggcggatcatgaggtcaggagatcaagaccatcctggctaatagggtgaaaccctgtctctactaaaactacaaaaaattaaccaggcatggtggcaggcgcctgtaatcccagctacttgggagactgagggaggggaattgcttgaactcgggaggtggaggttgcagtgagccgagatcacgccactgcgccactgcactccagcctgggtgacagaaacagacgtctcaaaaaaaaaaaaaaaaaaaaaaaaaaaaaagtaaggatagcagtatataaagctaggtaagagatggataaatgtaaaatgtgtataggaaaagaacaaaaaaaaaagaaaaaaggtacaggtgagtggtaagagcagttttaagtagggagggaggaagcctgagagaagagttatggattttaaaaaaaggaaaggaaaagatatgctgcaaatttaataattaaaaaaaaaaggagagcccagaagttggagtggaaaagaaatgtaccctttgtttttgctgttaggaatgggactaatattttagatatttagatattctaattctcctattgtttaaaagagcgaaacattataaagaataaagctaataaaaagttctaagaggtcattatcagaagtaactcttggaaattaagaagagactatattttttaaaaatcttaagctgttggtagttgtggtgattttgataattttgcattgcctgctggtcatgcgatcccattggtaattcagctcacctggatctcaaaacgctctcaacccagatcatgaacaaaaataaacttttagatgtgtgtgtaaccattttattttctggacctgtgtccacaagccacatgtggccatttaaattaattaaaattaaataaatgttgaaatgcagttagtcatcttaagtcctcttaagtgctcagtggccacatgtggttagaggtgcctgtattagcacggatgttgaacatctccattaccatggggcattctattggacaagtcaacactgtaacacttagaagaatttatagattttaaatatgttaaatgaacaaacgtttcgctttcatgattagaataaaatgtttgtattttaagtacacaagttgcttttaaaataggaaaagagcagaattgtttttaaagtggtgcctagttgcaagtttatcgacagaatctgtgaaattgctcgacttttttttttttccctaggtttcttttgtagattcctcagaatcatcaagtagagtctgaatatgcatatctgtccccaggcttcctctgttttgatttgtaacagaatttcaggcacaggaaagataaaaatctgctttttatttgtaatgaatttgaaaggtctttgtgcaactctcatgattggtgaaatgttttctgtaattatgtattccgagagttcacatattctggaatagtgttcccctgttttgcctaataagattcacacatggcatgtgattccaaggctctgactcagaacaacgcatcatctccagcgggggagggtcctgagagttgtggttttaaaactagtgccccaggtgattctcaccaggcaagtttgcagaacaccactctgaccgttgacgtactaaagatgcactttggcaggctcatgattgctgaaagatattacatttgcgttacctgagtaggactctgcacttatgtgacagtagaatgtgtttacatattttgagtagtcagaattctgacattattttatagtagatgcaggaccgtatcattgaactagtaatgaaacagtattttcttacctgtacattttcaagcattaagtcatagaaaatgttcttgatgaaattattcaatttatatgtgtgtgtgtgtgtgtgtgtgtgtgtgtgtgtacacatatatgcataactgcagaacaagtatatgtaagctctttcaagtaaggagagccataatttaggatcctccaagactgaagctggagggcagttacctacagtgtagtacttaggtattataaaaattcaactcatatgcattgtgtcatagcttccttggtagagcttttcttttttggtgttatatatataacaatgatgtgtcattcggattatgtgtcttaggtctaattgaactatattatatatttgagcttagtaacttgggttgactatataaaggatctataatatataagggaatgaagcacactggatatgacatgagacgtcatggccttgactcccagttctgccatgtctgaacgtgtgctacctaccgcagtgtcagtcatttgtttgaatgttaaactttagctgccaaacatggtgctaagtctaatgtagtgattcttaactagacatgggcattatccttacctagggaagtctctgaactaaaaatatgcacactctactcctggaaattctgacatctatatagtctttgttactttttgttttgtttctgaaattgagataaaatttccataccatgagttggcatagtaagtatgtaatttgatgagtatttataaattgtatacatgcatcaactaccacttcagttaagatagaggatatttgcatcaacccagaaattcccttcaagtctcatttctatcaattcccaccccgttcataggcaaccacagttttggtttccatcgtaatcgaggagttttgcagttcttggacttcatatacatggagtcataaagaatgcacattttgcatcacgctccttttgcataataagattttgcggttcatccatgttattgcatgtatcagtagtttacttgctttcttctacttcttccatcctaattgccatgtattaggctgttcttgcttggctataaggaaatacctgagactgactaaaagaaaagaggtttaattggctcatggttctgcagactgtacaggaagcatagtgctggcatctgattctggggaggcctcaggaagcttataatcatggcagaaatcgaagagggagcaagtgtctcacacggcaagagcaggagcaagagagagatttggggggaggtgccacatttcacaacaaccagatcttcagcgaacggactcactctctcaaggacagcaccaagccatgagggatgcacccccataacccaaacacttcccaccaggtcccatctccagcattggggattacatttcaacatgagatttgagtggggacaaatatccaaactatatcattctacccctggactcccaaattttatgtcttccttgcattggaaaatacaattcatatctttctaacagtcttccaaagtctcacttattcctgcagtaattcaaaagtccaaaatctcatgtgagacaaagcaagatccttccacctatgagcctgtaacatcaaaaacaagttatttactcctaagatacaatgggagtataggaattgggttaatattcctgttctgaaagggagagatcagccaaaagaaagggactacagaccccatggaagctcagaaaccagcagggcagtcattaaatcttaaaacgccaaaatagtccttgatttcaggttctgcatctggggaatactagtgtaagaagtgggatcccaaggccctgggcagctccacccctgtggctttgcagggtggaacccctatagctgcttataggctgctgagtgcctgcagcttttccaggtgcaggatgcaacctctggtggatctaccattctgggatctggaggatggtggcccccttcccatagctccactaggcagtgctctagtggcgacaatgtgtggagaccccaaccccacatttcacctccaccctgccctagtagaggttctctgtgagggctccagccctgcagcaggcttctgcctgggcagccaggctttgaaatgtaggtagaggctgccaagcattcttcagtcttacactctgcatgcctgtaggcttaacaccatgtggaagctgtgaaggcttatggcttacaccatttgaagcagcagtctgagctatatttggggccctttgagccaaggctggagctagagcatccaggatgcagggagcagtgtcctgaggctgtgcaggacatctgggcctgggcctggcccaagaaaccattcttccctcctaggcctctgggctgtgacaggaggggctgctgtgaagtctctaaaattccttgcaggccttttccctgttgttttggatattttaatagcacttggctcccttttagttgtgcaaatctctctaccaagtgtttgctccacagcctgcttgaatttctctccgaagagaggctttttcattctctgccacatgactgggctgtacatttttcaaacttttatgttctgctttcgtttagatataaatttcaactttaagacatttgtttgctttacatctgagcataggttgtttgaagcagtcagggcacatcttggttgctttgctgcttagaaattttatgcaccagatactctaaattatcactctgaagttcaaacttccacagattcctatggcagggcacactgcagccaagttctctgctaaggcataatatgggtgacctttgctccagttcccaataagttcctgatttctatccgagacctcaccagcctagacttcactatccatatccctaacagcattttggtcagacgatttaaccagtcttcaagaagttgcaaaccttccctcatcttcctgtcttctagccctccaaaactcttccaatgtctgcctgttactcagttgcaaagccacctcctcattttcaggtatctttatagcagtgcgccactccttggtaccaattttctgtattaggccattcttgcattgctataacgaaatacctggccgggaggtcaaggcgggaggatcatctgaggtcaggagtttgagaccagcctggccaacatggcaaaaccctgtctctactaaaaaaaaaaaatatatatatatatatatatatatatatatatatatatatatatatatatatatataaataaattagctgggtgtggtggcacacacctgtaatcccagctacttgggaggctcaggcaggagaatcacttgaaccctggaggcggaggttgcagggagccgaaatcactccactgcactccagcctgggtgacagagtgagagtctgtctcaaaaaaaacaaacaaacaaacaaaaaacctgagactgggtaattcataagagttttaattggctcacacttctgtaggctgtacaggaagcataatcctagcatctacttctgagacctcaggaagcttaaaattatggtggaaggcaaaaggggagcaggcatctcacatgataggagtacgagcaagaaagagagtgggagggaagctgctactctttacaacaaccagatcttgagacaactcactcactgtctccaggacagcagcaagccatgagggatctgtcccgatggcccaaacacctcccaccaggcctcaccttcaacattggggattacaatttgacatgagatttgggtggggacaaattgttaaactgtccctttccatatagtagccattaactgaataaactacactttttatctatttttctgttaatggggtgtatttggtgttttcagtttttgcctttatcagtaaagctgctgtaaaatccttgtacaaatcttattgggagaaaaaaaggtaactatgtgagatgatacgttaattagcttgattgtggtaatcatttcacaatgtatatttatatcaaaacatcatgctgtacacccgtgatggttaatactgagtgtcaacttgattggattgaaagaagcaaagtattgatcctggatgtgtctgtgagactgttgccaaaggagattaacatttgcgtcagtgggctgggaaaggtagacccacccttaatctgggtgggcaccatctaatcagctgccattgtggctagaacataaagcaggcagaaaaatgtgaaaagactagactggtctagacttccagactacatctttctcccatgctgcatgcccttgaacattggactccaagttcttcagttttggcactcggactggcttccttgctcctcagcttgccgactgcctattgtgggaccttttgatcatgtgagttaataaaatcccatatatatatatatatatatatgtaatttatatatatagatataatccatatatattatataatatgcatataatatataatatgtataatatatgcatgttaatataatatataatatatatttatcctactatttctgtccctctagagaatcctgattaatacaacaccttaaacatatataatttttgtatgttgatcacatttcaataaagctggaaaaatctttttttgtcaatgtatgtttttctttatttggggtaaataccatagagtaattgtatatttaacattacgacctgccagcaggtgttccaagtggttgaactgttttacaattctaccagcaatgagtgaagtttcagcagcttcacaccctctcaatatctgattttcgttgtcttaatttttagacattctagtggatgtgaaatagcatcattatggttttgattcaattttcatttccttttcatgtgcttgtttagctatttgtgtattttcttttgtgaagtgtcatcagttcaaaccatttgcttaatttttattatgttggtggtggttttattgatgatttgtagccattgcttatatatttaagttacaagcattttgctacatatgtattacaaatgtggtctcccaatctgtgacggttttcatttaaatgtggaggagagtagcggaggaagctggtggatcctctcagtcccaggagtaccagtacattcagtagctgtcttaattcccgctggacttaattgtttccttcagacaatagccctaaaatgttaagagtgggcaaattcttggcttctcttgttagacctaggccaagaactgggatgctacagtcagattatttttttcttcagttgtttcagttttatttgttctgttcagcactgtatcttttaaatgattccttttcatgttcctaattaggttaacatagcattgtctttttccttccccaaataatcagttcatttaactcttcaaccccatcttttgcttttgacttaaggaaatttctagctcttagggtttttttgttatttctagtttataattaattcatagttttattgcattatgaccacagaatattctctggcttattttttgctatttggaccttttgtctagttttctttgtggcctgggtatatttcaatagacaatgaaaaagatctatttttgtaaattttcaatagacagtggaaaagatctgtttttatatcacatcatttgatatacttcacttaattatagctcactagttattttttatttgtcgtttatcttcctgaattgagaaaggaaaataagcttcttccactagtgatgtatgacccgtggtttcttttagtttttaattaaaaggcaagcctttgcccattttcaatattttagagttctgttagtttagggataatatttatagcatataagttggtcagtttattagaaatgcagaagggacacaagcccagaaaagtggaatcagaaaagatttgaaggaaaagctgctgcttgagcaaagtcttgttgaaaggaagaaggaccatggtaatatatgagggtgagggagggaggggacaccgtgggaaaagtaggaggaccttgaggcagaggtggctgctacaaggctttggagtgacagccagccagtcatagcatttccaagtaatttttttatatattgaagtttttcttctgtagttttttttttttagctatataaatgaaattttgtgggctttaaaatgtttaaaaataagcatttttttcctttaaacttttcgggggtttgttttgtttaaaattaaacagcagtttggttacactttcatttcctgagtactttacagggatcttttaattgtttaagtatattgaatgtttctatggagaagtctgaggttggcttgatttttttttccactaaaaatacttttgggcttttttctttaagtaccagcaagtttagttatacccaattcagtgttatcattctgtattggtgtgtcctgacatgtgtgtgccctctcagtgtataagtttaagtcttctgctagttctggaaaatttgtctttaatttgttccgtgttcttcttgggaaagcagttagacacatgtaatttttattaatcttctttctaattcgttgttaatttccatttccttttgctcatttattcattgtgtctttcatgccccttaatggatttttcagtgatgcttttttcactttgagcagcttcttgtgtagatttaattttttttaatgagctctgcaagttcctaagtcatctcattctgtggttttgccatatctttcaagagctcttttatatcttctttttcaagagtgattttacatcctggctaacacggtgaaaccccgtctctactaaaaatacaaaaaaaattagccgggcgtgatggcgggcgcctgtagtcccagctactcgggaggctgaggcaggagaatggcgtgaacccgggaggcggagcttgcagtgagccgagattgcaccactgcactcccgcctgggccacagagcgagactctgtctcaaaaaaaaaaaaaaaaaaaaaaaaaagagtgattttactttttcattaagttcttcaagttttagtgatcttttagtcatgattattatttacttggtggaaacatttttttctggtgacattttcttagctgtttttcttgtttttcctatcacttaaccctccatcccatccccccctttcttccctacctctatttttttcccctccttccctctctctcctttaatatctttgtctattctaggtcctatgccagttcctctctctgaatctttgaatgaattgaattccccctggacctctgatctgaaacaggtttatgttggggctggaagagaagagagagcagcatttcttcctttatggcacaggagtgtatattagagagtatttaaccttgactgcttactgccagtgccctggaagccacagtctgttcacagatcactgttttccacccacctcaataacagtgtttcccacatggagtttgagtgagtctgtggcagagccctcctctgccatcttccctcacccttgcttgggtttcactattctttcatatacattgtgagtggtatgatagatttttgcctagctttatttaagatgggaattccatttctttttagaaattcttctgttgttttgggttgtagtaagggcaggtttcttctcaacactgtcttaaaacaaggtttttctttcctttacatctttcagtaaatgtgttccagctaacaaagccttcttcagagtaacgtttaagatttggtttcttgacttcttccttccttcctttcattgtctggtgatatttcttcccattgttgttttcctcgaggactagatttcactgtctatggtttgaattcccagatgaggtaactatgaacaagtagggcatgagtgtgctgtgaggattatttgcttggagggcataacttggtattgcatttattaaaaatattgtggagatcaatatttccatctcagtttatttctctgggctatgttgtacttctttgtgcatttatgaggttgtatattttatgaattattaaggcaagcttggatgcatcttttaaaaataataggcctaggttttacttgcctgccatttttctggaatcactgatttccttttattattgaattctacttagtgttaccaacttagcattgctttttacatttcaaagatcaaagatataatttttaaaagtgcatagttctgtacttcaatgggggaggagataactattttagtttctatcatcaaataccaaaagttattttcaaaggcactacaggcaaaaaaagagttgggatgggaaagaaaaaacaaaacaaaagtcactacctgcaattcagtaaaaatgaccaacagcatgtgctgccatgcagtgcttacagttgtttcaaatttacaaacagaacaataaaacccatttagcataatgaaatatttatttttatccaatatatttgcaagatgttctccattcatcatatttgcaagcagcagcagcaacatttctttaacatgagccaaatgtaatttccagctgttgaaattgttttttaagtcttgttaaaaacagttatctaacaacaaacctcaatacatccccttttccacttttttcttgattttatttatgagtgtttttcagtgatgcttgatgtttgagataggaatagagtatataaataaaaggcattcttatctttatataacttactctttcattcaccagatgagttaatcaaaattttaattttgcattctttttgtttcacaatttaaaaagcatagagtaaaaagacaaaaagcctatggcctctaaaacagagaaaagctagctataacataatgcatttttgaactgctaaaacgtgaagattctattattctccatagatttgagtcaagacctgtgcaaaagccctggaggttaaaataattcctcagcttcatcttttgtggtgtaagtttacatgcacaatgggtgttattctaaagctgcttatcctttagattcggtgattcttatcatatacgacagtattatgtagataaatggtcaaaaattactttctgcttatttgatgttttttgttcagttgtctaaagttgcttttttaagggaagaaataatacagaaacaatgattattgttattattcgcccaaggttacaagagcaaactaatcaagcctagttttgactaatctagctagtttttgctctcttttgcctctgggcctctgcccggaataatttcattcccttcatcttttctcacttagttaactcaagctttttaagtaataataaaacttcttaccattttgattacttacggtctcagtttctgtggtttgctttctttcgtgcttatagctgaattggctttgtcctttctgcatgcccctatagagctttgtacttacccaccttaggaatcatctcactgtatgattctacttgtctctcctatcttcttgaccagaaatatattttacatttataaaatattaggtgaaccacatacgtaaaattaaatcttgctgtagccatgttaaaaaagtaaaaggataaattcatactgtcttattttctaacctaccatattcagaatattatcattttagcaaataactaatataaaattattaatgatatattttatattctttttgtactaagtcttcaaaatctattgttttacacttaccgcacatctaagttggtatgatctgcatttcagatgctcaatactacacatggctggtggctaccatattgttatacaatagttctagtctgtggtctgcttgagggttgaaaccatgtctggtttttactgtacttatggctacagtcagtgcccattaaataagtgcctatgaatgaatgaatgagtaagtaaaatatgctgggagggatattatattgagtgatgccaatagctaataatattagtaccattcgtcaagagacctaaaggtacattggctaaaaataggactgtgatctcagagaattctgcacatttcagtcataagttaggacagtggggacaggttttgaatagattaattgccaaggattgattactggggacagataggagaagaaattaagaggatggccagtctctatccagagtctattttccagctgatatcctttgatccagagcatttgacagtcagccatcacttctactggtagactaatcgccttctaccacagtagtcctattcaaattcaaaatcaagtcctgtgcatacccttttaatacaaatagaggccaatgtgtctaatttggcttgctgctcaaaatataaaacttaacttggtataacctggtacagtcattatggatagcaattcggtattatgtagaaatatgaatagtgtgcatatcctatgacccagtgattattttggtacagccatgcattgcttaacaatgtgtatgtgttatgagaaatggatcattaggtgatttcgtctttgtgcagatgtcatagagtgtacttacacaaatctagatggtatatcctactacataacatattatgatatatccgtcctgttgcttctaggctacaaacttatacggcatgttactgtactgaatactgtaggtgattgtaacacaatggtaagtatttgtttatctaaacatgtctaaatagagaaaaagtacactaaaaatacagaagaaaagataaaaatggcacacctgtctagggcactgactgtgaatggagcttacagtactttcctggaagttgctctgggtaagtcagtgaatgactgctgaatgaatgtgaaggcctaggacatgactgtacatgacattagactttctaaacgctgtacacttaggctgtactaaatttattaaaacagtttcctttcttcaggaataaattaaccttagcttactgtaacatttttactctataaactttaaattttttaaaactctttcataataacacagcttaaaacaaacacattgtaagctgtagaaaatatttttttctttacatctttatgctataagcttttgtctatttttaatttttttatgttttaaactttgttgttaataactaagacacaaacgcacccattagctcatgtctatatagggtcagggttgccaatattactttcttccacctcacatctatcccactagaaggtcttcagggacagtagcactcatggagctgtcatctgctatgataacaatgccttctggaatacctgctaaaaggacctgcctgaggctgttttacatttaactttttaaaaaactagaaagtacactctaatgataaatatatagtatagtaaatacataaaccaataacatggtcatttattgtcattatcaagtattatgtgctgtacataattgaatgtgttatacttttatatgactggtagcacagtagatttgtttataccagtatcaccacaaacacataagtagcacatgacattatgtgccatgacattgcaatggctgtgacatcactgggtgataggaatttttcagctccattataatcttttgggtctactttcatatatgcaatctgttgctgactaaaatgtcattatgtgatcatgactatatgtactattgaaaaaatgttttatatttccataaggaggcctataaatgataattgcagctttttaaaaaatcatgaaaacatgtaagtcaccttacatctattattgggagatgagataattttgacacattcattagctctgtacagaaatcaaatgaatctagtgaactagatttgtatttctaaatggaaagcccttgaaaacatagtgttgaatgatataataagcatgttttggaacacctttctaaaaaattaaaaataacacatcacacaatattacatattgctcattgatgcaaatacatgccatataaaagtaaacaaaacaaccacagctaagccataagggtaaagctagaatagtatatactactggtaaggggtgtgggagtgggttgggggcattagagaggactctagggcctaaaaacttctctagttttactgcatgacaaagcactgaatgatagcaactggcaattttaggtggaggtcacagaggtgttatattattctttgatgtattttggatttaatttataagatacattttatgcattctcagagacccagaggatttcccttgggtctgtacaatgtattttgaaagtaaaaatttaggattaaaaatagtagggatattttttcattttagtccttttacaaattatttcagttctttgctgaaaaagggtgcacagatggagcagtagcccttttgatgtacacaagtacaaaagtgcattttataaacaaatttactttatcctgtctctcaggctggaattgtaatatattaggaaatacctaaaaactcaatgtcccacagggctttctgtattctcgtgtgttaaggtaaaaagtattttttaaagtatgaaatggtctgagcctttgaaacactttaggctgtaatgtattttaattcaattgcacaggcacttatggaatgcctgttgtatgtacagatactgcatcaagcgtgaggatgactaggagagagtgagtagaaaatgagaggaggcggggaaataaatgactgctctagacttctaggatgttgacacagtttggaaatgatcaatggagtaaataaaccttgactgttggagtgggaagcagtatattttgttaatggagttatcagtatattgcctttcagctctgcatcctgcctttattatctgctctgataatggagctggacctttagagcatttctcctttgccatgagtttgatgttgaactgtgtcagtagagggcttagagggaggctgctggatgaaagggctactcgtcactttccaatgtccttgtcttgtcaggtgcctgaagcacagtgttttttctgaagtactctgtggtctcttcccttggtcagtttcccagcatcctcttagatggttacgcagaagattactatcatgtggggacacctccctccacctgctttcgctagtacccttcagggggcttagcagtgagtttcaaggctgtcacctccctgtggatgtgtccccaacactcaggagtgagcaggtccagctagtcttccattgggccctttttagtgatgtcatttcttagtcccggcaggtggcttcctagtctctggatctgctctcaagttcaaattactttcacaaattactttctctgttcaagttagcccatgggaccttctgattggattgtgttgcatagagaaagcaaactgtgtttgttccagcatgctaaagtcaacaaaatggactttaatatttaaaagatctctttaatcttttctccatttttctttctgtagggctttaacctagctctatgaatgggttactggattagtagatgtgaacatctctatggctcctaccatgtattgcattggaaaagccatctgcattattgtcattattaaagttgatgtttgcggtttttacatttcgtatttcatcctttatgcttcacttttgccatcctaaatgcacagcagtggctttgtggtataaaaaaaataatgtggaatttattgccatatggatctagtttctgattcaggtgccacagttatattataattgtatatcacaaacatactaactcttatatatctaagttcttactttgaagaccacaggaaaataattatgtaacttatataattactttgcatctttgagctcatttttcatgagacattctggttgctgtaggttaatcatgttataataaaacatttggcatagtatgtggggaagagtactatcatcatggatagctgccatgtattagacatcttttgtgtgcctttttttttttttttgagacagtctcactctgttgcccaggctggagtgcaatggcatgatctcagctcactgcaacctctgtctcccaggttcaagcgattcttctgcctcagcctcccaagtagctgggattacaggtgtgtgccaccatgcccagctaatttttagttttagtagagacaaggtttcaccatgttggccaggctggtctcgaactcctgacttcaggtgatctgcccacctcagtctcccaaagtgctgcgattacaggtgtgagccaccatgcccagcctgttgtatgctttctaatatggcctcagtaagtggcagctatattgtgttctgttctttagcttattttaaaaacttttgtccttgtttgtttaaaacacatactactaataaacaaaattattatatttcctagaacaattttagtatcattagcaagatttccatgaaagaatgctgcacaaaataatatcaggatctttcacgtagttagtgtgacagctgctgttctactattttcagttaaacatcttgttttgaaatacttacagaatcatatgcagttttaagtaatatagagagatctcatgtgcccttcaacaagttttcaccgctgataatatcttgcaaaattatagtacaatatcactatgggaaaattgacacattgatacaattcagtcatcttctgtagatttcaccacttctgcattatgtgtattgtatatgtaggcattcagttcagttaaactttatcacgtgtaagttgatgcagccatcaccaccacagtcaagacacagagcacttccatctgcacaagcatgcctgttgctacctttataaccatgctctctgctcttcattcttaacttcaggaaaccactaatttattctctataattttgccatttcaagaatgttatatgaactgaaacatgaaaacattatggggtttggttttttcacccagcatctttctgtagagatgtatctagattgtcgcatgtacgaagagctcgttcctttttgttgttgagaagtgttccacagtatgacataccacggtttgttttacctctcacatgttgaagagcagctgggttgtttccactttagggctattatagataaaacttttatgaacattcttgcataggtttttctgtgaacataagttctcatttctctgggttacatgcccaagagtgcaattgttgtgttgtagggtagttccatgtttagttttatatgatactgccaaactgtttttttcagagcggctgtaccattttacattcccaccagcaatatatgagtagtccattttctttgctccctcaccagcatttgatgtaaaataaaaggtatgttgtgatgtcttattgtggtttttatttgattttccctaatgactaatgatgttgaacatcgtttcatgtgcttgtctgccatctctatagcctctgttctgtttgtaaaaattttttgaaaacaacatttcttacagttttcttacaattcttttttgaaaataggcaggaaaaaaactgatctgtttaggtttctcttttggctatttgctatagcagttgttcctgggtttccaaatcatggcttcttttctagaagttatctcacatatctagatttatctcaggttcttcctaactatcttagtctgttctcacgttgctataaagatactacctgagactgggtaatttataaaggaaagagatttaattgactcacagttagttctgcatggctcgggaggcctcaggaaacttacaatcatggtggaaggggaataggaagcaagcaccttcttcacgtggtggaaggagagaggagagtgaacaagagcagggaaaactgctttataaaccaacagatctcatgagaactcactcgctgttacgagaacagtgtaggggaaaccgcccccatgatccaattgcctcccacctttgacacatggggattacaattcaagatgagatttgggtgggacacaaaacctaaccatatcattaacattctgttttcatgtttcctttaatttgggaatgaccaaaataaacaaggaaacccaaactcaagcccaaacgacaaaactgctctgaaccacaacattcactaacaactcatctattctacaaattttatttaatgttttaaattcttaaacattttttaaaataatgccttttaatttttaatctcaattagtataaaatatttccattaagcagagacaccttggggtaaatgcaatgtagagaaagtggaaaagtaggagataagctatctaaaatactgtattattcattgtaaggagatcataggaaggcccatataattagaatataaacagaactgtaaaattgtgaaaggtgatagagagccagtaatagcaagaaacatcttgtgaaatgtggccaagcattggaacaaactaacaaataaacaatacagaagatactaaatagttgtaaatagtaccagaatctgtcagttgctcaagacaggaacatgaaagttatctttgattccttttgcactgtcttccatatccagtctcagacaatccagccatttctatctcctgaatacatcttgacatacatccatttttccttgccctaatccaagtcaccatctttcctgggctattggaatgacctcctaaccagtttcattagtttcactcttgtacccgtctaacttctttccactgtaaaaggaagaataatctttagaaacatattaaatgttattaattgataataataattgtatatatttatggggctacaatgtgatgtgctgatatatgtttacaatgtggaataactaaatcaggctaattaccaaatccatcacctcaaatacttattttttgtggtgaaaacatttaaaatctacattttatttgattttaaaatatacaatgcattattatttattgtagccatccttctgtgcaatagatcactcaaattccacttgtcgaactgaaactttataccctgtgaacatcttcctttacctcatctaccccaacccccagcctctggaaacccctattctactctcttcttctatgagttcaacttttttagattccacatgtaagtgagatcatgctgtatttatctttctttgtctggcttatttcacttagcataatgtcttacgggttcattcctgttattacaaatgacagaatttcctcccttttaaaaggctaaatagtactctgttgtgtatatgtaccacattttctttatccattcatccgatgacagacacctaggttgcttccacatcttagctattgtgaataattctgcagtgagtttgggagtacagatatctttgacatacagttttcaattccttttggaaatatacctagaggtaggattgccggatcacatggtaattctattttaaattttctgaggaacctccatactgtttttcaaaattgctgtgttaaagcaggtttctcataagcagcaatgcaagcaaaagacaatggagtaagacctttaaaataatttaaaaagtaaatatcaactcagaattttatctttccaaagcaaatatctttccaaattggaggcaaactaaactttttcagaaacacaaagtaattgatctctaaaagacccaagaaatgttaaaggagtccttcaggaagaaggaaaatgattccagggagaaatatgaatcaacacaaagaaacaaacaaacaaaatgctgggaatggtgtctacaaggcaaaatataggagaatgtttttcttgtgacttaagtatttttggaagataattgaccatttaaacaaaaatgataaaaacataatgtggggttaataacatatgaaaagactgggcttggtggcttgcgcctgtaatcctaacactttgggaggccgaggcgggtggatcacctgatgtggggagtttgagaccagcctggccaacatggtgaaaccccatctctactaaaaatacaaaaaatagccaggtgtgctagcagacgcttgtaatcccagctactcaggaggctgaggcaggagaatggcttggacctgggaggcggaggttgcgatgaactgagatcgcaccactgcactctagcctgggcgacagagtgagactcccttaaaaaaaaaaccagaaatcaaaaaacaaaaaacaaaaaaacccagaaaccatatgaaaaacagaatgcataataacatataaaggccaaaaggggagaaaggaagtatactgttatatttttattgtgctatgtgagaacttatatcacttctaagtagactaggaaaatttcaaaataaatataaattttagagcatgtaacaaaactaatagttatcactaatatgccaataaagaagaaaaaattcaaaaaaataaaaaagaaacactgtgttaatttgcatttcctcaacagtgcgcaaaggtttctttctctctgcatccttccttgccaacatttgttatcttttgccttcttttttgttttgagacagggtttcgctctgttgcccaggctggagtacatcttggctcactgtgatctccacctctgggctcaagtgattctcccacttcagcctcccgagtaacttaaattacaggcacgcactaccacgcgtggcttttttttttttttttttttttttaagtagagatggggtttcaccatgctggccaggctgctcttgaactcctgacctcaagtggtccactggccttggcctcccaaagtgctgggattacaggcttgagccattgtgcctggcttagcttttgtcttttagataatagccatagtaacaggtgctaagtgatatttcattgtgattttaatttgtatttctctgatgattagtgatgatgaatatttgtttatctgttactcatttgtatgtcttttattaagtgtctgtttaggtcttttccttgtttttgatgtattttcttgctattgagttatttgaattcttcatgtattttgaatattgtcttcttatcagatatatagtttgcaaatattatatctcagtccatggattgtcttttccctctattagttgctttctttgctgtgcagaagacttttagtttgatgcaatcccatttttctatttttgcttttgttgcctgtacttttggcaaaagaaatcttggcctagcgcaatgtcatgaagcattttcctatgtttgtttttcttgtagttttacagtttcaagtcacatgtttaattctttaatccatttgagttgattttttcatatggggttagaaaagggtccagttttattcttttgcttgtggatattcagttttccaatttattgaagagattattctttctctattgtgtgctcatgatacctttgtcaaaaatcaattgaccatatatatgagtttatttctggcctctctattctgttctttcagtcattgtgtccgtttttatgccagtaccatattgttttgattactatagctttgtactagatttgaagtcagataatgattcctccagccttgttcttattgctcgagattactttgactattgaattaaagatcttttgtggttctctatgagttttaggattgtatttctgtttctgtgaaaagacattggaattttgctagggattgcatagactctatagatcactttgggtagtatgggcattttaacattattaatttttccaatccgtggacacaagatatctttttctttgtatcatttacaacttatttcattgtttcatagttttctgcatatagatcttctgcctccttgatcacatttcttaacgtattttatttgtttgatgctattttaaatgaggttgatttcctgatttgtttttcagataggtcactgctagtgtaaggaaatgctatggatttttgcttcttgattttgtaccttgcaactttactgtatttgtttatcagttctaatagtttgatagtatagttcttagggttttctatatataagctcatgtcatcagcaaacagacaattttacttctttatttcctatttggatgtcttttatttctttttcttgcctaattgctctggctagtacttgcagtactgtgttgaaaacaagctgtgagagtgggcacctttgtcttgttcctaaccttaaaggaaaagctttccacttttcaccattggatatggtgttagctgtggggttttcatatatggccagtattgtgttgagataaattccttctatgcctaacttgtgagtttttatcataaaaggatgtagaattttttcaaatgttttttctgtatctattgagatgatcatatggtttttgtccgttctattaatgtgatgcatcacatttattaatttgtgtatgttgaattatccatgcatcccagggataaatcctacctgattatgatgaatgatcctttcaagtgctattgagtttgtttgctagtattctgttgaggacttttgtatttatgttcatcagggttattggcctgtgattttcttttcttatagtatcatggaagaatggtcttaacatgtaagctagaatataacactcttcaacttaaaatctttaatgacttccctttatatttaaactgtctttgtcattgtggtctaaataatcggtttttgactacctctcaactttatcttgtataattattctgttatctaagtaaactcaaaaacagctggcctacttttagttattttaagttacaagcttttccatgccttgatcaatcatattttaaggatgaagattaatgtattcctaagatgccctgagatagcctaaataccaaaaaccattctgtgttccacaaaccaagaaatgtggtaattagtaaagcattcattttaaacactttgacctcctttaagcactttgctcttaagttgcccctcaccccacaagattgtaactcttcatctacagaaggcccactgtgaatttttgggtaattatctcttgcttttaacctgaatccagttattctttttctttccgtttttcttttctagaaacactctccacaattcctctcccttctttctattcttagtcttcacactgtcccctgtttcctaaggaagaattaacttttgattgtgctcatttagaaaaagagcatagtcgagttctaagaccataatatgtgaaattcttgcattagtcggtagtaaaaatatacagtcatttctgtttctaattatttggcattaaggtctgattccccaagttaacctattatcaccgcttagatttaatgatcactgtttaagagaatagatgtgtttgctagaaactcctactcagtaaattgtgttgatatttttgtaaatatatcaaaggtaccaggataggtggagatataagctgattaggtacttttttccttctacctctacagagtaagataaaggttaagtatcacatttttgtgtaacaaagtatctgattttgatgtgctttcacttttgatatatgcaacaatgaatctctcatttgaaatatgacttgtatatgagttctgggatctgtgaccactgatccagaaaagatgaagagaaaaggaattctggtgacaaagaaacaggcaaggaggcgaaacagttccaagcttttccaccttcttctacattcattatgtaatatggttgcagcaacagttattttaatttaaaagctttacttaaatacttttacttttgctgactggaccaaccactattattacccatttcttttattccaacgcttcttggtagttatatatattttactattttgctcattcatagatatctgccacatttcattattttgacactgccactttactgatgtttttacattatgaagttaactgatccaatagaaattgtcacttttggtgctcattctctgtggtggtgatacatgtggtatgttttctttcttttttttcttctttttcttttttttttgaaacagtctctctgtgtcacccaggctggagtgcagtggtgcaatctcagctcactgcaacctctgcttcctggattccagcaattctcctgcctcagcctcccgagtggctgggattataggcatgcgccaccatgcctggctaatttttgtattttttatttttttaggagagatggggtttcaccatgttggccaggctggtctcgaactcgtggcctcaagtgatccgcctgcctcagcctcccaaagtgctgggattacaggcgtgagccactgtgcccagccggatgttttctttttctcaccatcgtgggagatgatgtgaactatccagcagatccaggacggtagtcagaaggacctgactttgactgttgtcactagtatagcaataatttaggaataggttctcaaataaataggaggcataaatggagatgatgtgggattatgctataagactgctataagactacccagagtatcacagttatccgtacatatccagattgtatgagaagtcttactgaagattcagtaagcctgaaatagtaagttgttacctgtgcatctgggatagatgtgaaggcaacttagcacataaattgctgtgttaatttacctgactttggttgccaggtagagtgtagtttctgggtgataggtttgttttcaaaattggaaaagttagagaataacagcgagcagtctgctacacagctaagtattatgggactctgggcagcctgctgaagtttgagttgtgctctctttgttgcactcattttcaactggtagtgattttgcccaccaagggacatttgacatttgcagatattttggttgtcacaaccgaggattactattggcatctaactggtagaggccaagaatgctgctaactatgctacaatgcaccagacatctacccatataaaaagacccaaaatgtgatagtgccaaggtactagagaaacaccaacaaagttcttttgtaagttttcttattcgttaaaggttgagcttgcatgtttgctaccttgttcctaaagcatggccaatctttagtaaaaatacaatgattgagggtacacgtaaaccttaatggttcctatcaactaatatttggacaaacgtgcatgtactagctttacacatacaagtttttttttctgtgctgtttacctatttgcagtttttatacaatatgagttttgcctatctttttttttttttttttgagacagagtctcactctgtcacccaggctggagtgcagtggcgtgatcccggctcactgcaagctccgcctcccaggttcacgccatcctcctgcctcagcctcccaagtagttgggactacaggcgcccaccaccacacctggctgattttttgtattttttagtagagacggggtttcaccgtgttagccaggatggtcttgatctccaccttgtgatctgcccgccttggcctcccaaagtgctgggattacaggcgtgagccaccacacctggccgagttttgctcatcttttagaaaaatttttctgtgccactttaggatgaagagagatagttgaggtttggttgtttccctcagatttcttagtaatgaggtatttagtgtcactcagtattaaagaattatctgatcgtagactttatgaataggatcaaggatgattaaatgtcatactttttctccatagtgaatataactaggagaggaggaagcaggaagtgttagataaaaagggtaatagaatttacacaacaatatttaccaaaatgtaataaaactcttcattacctggtaagaaccatatcatgaggactagcacagcactgtacttgtagatgcttaatataaatgccacctgatttttattctatgtaatgtaattctgtgctactgacttgactaaaattcagagtattagactcattgtttgtaggatattacaaataatgtgaactttcttgataattgcacataaatatactataataaaactttctacagtgctgaaagagttctctaaacaattaattatacatttcagcactcttatgagccaagtaaattgttactgtctctcaaggagagcatatatttctgtgaaatgcttgtaatacaagtattccacatgaaataatgtcttgatagggaaatctactgatctgtttctgttaactatgtccataaactcatttagaccttcgctcatgatagcgtataccaacaataggcaaagtacctgcaaaaatatacacctcctcttacgtgcttgttccaacatatatttgaggcataataaagtagaattttccaactgaaaggaggattttgtgtctttggagcagaaattaatatttgtattaatacagatattaattctgttttaagtgacagacaacccagcttaaatttgcctgaacctagaaagagcatttattagctcacatagttggaaaggctagtggctggctttgcctgcagttatagacactcaaacagtgtcttctcttgtctcctagccttaccttcactgttttggcttcattctcagggtagagtaatacatgatcatagaatcaaatgcttagtcccacaagttacaggacagttgaagaggaaacctgcaaagtctccttagctctcattttctttgcctgggtcatatttctgtctctgaatcagtcactctagccaggagattgtgatggcatagattgagccatatgctgagcttggatttggttgggattcaataccacttatagctgagagtgcaagagtaagttgccctgaagaaaatttaaattatgtacaatataaatatttgtcctaactcttctctctttccagaagtaccactgtaacaagtttattgcacttgcaattctatagatgtaaaaattaatacctttttatgttgtatatgtatagtaccgtatgtgtttctttctcttgcttttgtcattgatcaatatattttataccccctacttatgaagatcttcaaggaaataccataacttctcttttaaataatagaaatatcctaaatagacattttattgtttataaagtatttaagaaatatcaaaaccgaccacccaaacattcttaggaattcattaagtgaaaatttccatgagtctttttataaagtgtatttcttattaggcttcaatctatatttggggttttaacacaggcagaaaaatacctgtaggtaaattaaatacttttcagcaagtaatatttctgaaagaatgtatcagtttagagcatcttggctgattaaagtataaagtattatatcagtattgtccctagtgatgaaaattggataagactgggtgtatggtggctcatgcctctataatcctggctttgggaggccacattgaggggatcagttgaggccaggattttgagaccagcctgggcaacatagttagaccttgtctctataaaatttaaaaacattagtcacgtatggtgagatgtacctgtagcttcaactacttgaaggttgaggtaagaggattgctcgagcccaggagtttgaggtgaccatgagctgtgatcgcaccactgcattccagcctgagcatcagcataagaccctgtctcaaaaaaaaaaaaaaaaagaaagaaagaaaagagctggttaaaaactcagattttcaactgaaaataaattaaagatttaactgtaagacctgaaactatgaaagacctaaaacaaaacatagcggggaaacttcatgacattgatcatggcaatgatttcatggatatgacatcaaaagcaaaggaaaccaaagcagaaatagacaagtgggactacatcaaatttaagagcttctgcagagcaaaggaagcaatggagtgaaaaggcaacctatggaataggagaaaatatttgcaaaccatgtatctgataaggggttaatttctaaaatacataaggaactcctagaactcaatagtgagaaaactaataaccctattttaaagtgagaagttttgttgttggtgtataagaatgcttgtgatttttgtacattgattttgtatcctgagactttgctgaagttgcttatcagcttaaggagattttgggctgagacaatggggttttctagatatacaatcatgtcgtctgcaaacagggacaatttgacttcctcttttcctaattgaataccctttatttccttctcctgcctaattgccctggccagaacttccaacactatgttgaacaggagtggtgagacagggcatcccagtcttgtgccagttttcaaagggaatgcttccagtttttgcccattcagtatgatattggctgtgggtttgtcatagatagctcttattattttgaaatacgtcccatcaatacctaacttattgagagtttttagcatgaagcgttgttgaattttgtcaaaggctttttctgcatctattgagataatcatgtggtttttgtctttggctctgtttatatgctggattacatttattgatttgcgtatattgaaccagccttgcaacccagggatgaagcccacttgatcatgagccaaatcatgagtgaactcccattcacaattgcttcaaagagaatgaaatacctaggaatccaacttacaagggatgtgaaggacctcttcaaggagaactacaaaccactgctcaaggaaataaaagaggatacaaacaaatggattaacattccatgctcgtgggtaggaagaatcaatatcgtgaaaatggccatactgcccaaggtaatttacagattcagtgccatccccatcaagctaccaatgcctttcttcacagaattggaaagaactactttaaagttcatatggaaccaaaaaagagcccacatcgccaagtcaatcctaagccaaaagaacaaagctggaggcatcacactacctgacttcaaactatactacaaggctacagtaaccaaaacagcatggtactggtaccaaaacagagatacagatcaatggaacagaacagagccctcagaaataacgccgcatatctacaactatctgatctttgacaaacctgagaaaaacaagcaatggggaaaggattccctatttaataaatggtgctgggaaaactggctagccatatgtagaaagctgaaactggatcccttccttacaccttatacaaaaatcaattcaagatggattaaagacttaaacattagacctaaaaccataaaaaccctagaagaaaacctaggcattaccattcaggacataggcatgggcaaggacttcatgtctaaaacaccaaaagcaacggcaacaaaagccaaaattgacaaatggggtctaattaaactaaagagcttctgcacagcaaaagaaactaccatcagagtgaacaggcaacctacaaaatgggagaaaattttcgcaacctactcatctgacaaagggctaatatccagaatctacaatgaactcaaacaaatttacaagaaaaaaacaaacaaccccatcaaaaagtgggcaaaggacatgaacagacacttctcaaaagaagacatttatgcagccaaaaaacacatgaaaaaatgctcatcatcactggccatcagagaaatgcaaatcaaaaccacaatgagataccatctcacaccagttagaatggcgatcattaaaaagtcaggaaacaacaggtgctggagaggatgtggagaaataggaacacttttacactgttggtgggactgtaaactagttcaaccattgtggaagtcagtgtggcgattcctcagggatctagaactggaaataccatttgacccagccatcccattactgggtatatacccaaaggactataaattgtgctgctataaagacacatgcacatgtatgtttattggggcattattcacaacagcaaagacttggaaccaacccaaatgtccaacaatgatagagtggattaagaaaatgtggcacatatacaccatggaatactatgcagccataaaaaaggatgagttcatgtcctttgtagggacatggatgaaattggaaatcatcattctcagtaaactatggcaagaacaaaaaaccaaacgccacatattctcactcataggtgggaattgaacaatgagatcacatggacacaggaaggggaatatcacactctggggactgtggtggggtcgggggaggggggagggatagcattgggagatatacctaatgctagatgatgagttagtgggtgcagtgcaccagcatggcacatgtatacatatgtaactaacctgcacaatgtgcacatgtaccctaaaaaagtataataaaaaaaaattgagaagtttttaatataaatttaaggtatacagtatgattttttgtgaacttttaggttcaggggtatatatgtgggtttgttatattggtaaattttgtgtcatggggtttagtgtacaggctgttttatcactcaggtactaatcatagtattcaataggtagttttttgatcctctcctttttctcaccttctgccctcaagtaggttctggtatgtgttgttcccttctttgtgtgtgtgtgttctcagtggttagcacccttttataagtgagaacatgcagtatttggttttctgttcctgtgttagtttgcttatgatactggcctccagcttcatccatgttgctgcaaaagacataatctgttttttttttatggctctgtagtattccatgacatatctgtaccacattttctttatccactctactgttgatgggcatttaggttgattccgtgtttttgctattgtgaatagtgttgcagtgaacatacgtgtgtgtgtgtctttatggcagaacgatctatattcctttgggtatatacccaataatgggattgctgggttgaatggtaattctgttttaagttctttgagaaatcaccaaactgctttccatagtggcagaactaatttacattcccaccagcagtgtataagaattcccttttctccacagtcttgccggcatcttgttattttttgactttttaacaatagccattctgattgatgtgagatggtatctcattgtggttttaatttgcatttctctaataattagtgatgctgagcatttttagatgttggccatgtgtatgtcttcttttgaaaggtacaacatgatgttttgatatacataatgattagaggtaagcagtttaacatactcatcatcttatatatatatatatatatatttttttttttttggtaagcacatctaaaatctactctcttcaaaatggttaaaggacttgaatagacatttctctaaagaagacacacaaatggccaacaggtacatgaaaagatgttcaattcactaatcatcagggaaatacaaatcaaaaccacagtgaggtattgactcacacctgttaggatgactattatcaaaaaacaaaagacagcatgtattgttgaggatatggagaaattggaacacttggacacttggtaggagtgaaaaacatgtgcactcggttggtttacactgttgaaaactgtatggtgaaaattaacaataaaattaccataaagtcctgaaatcccacttctgggtgtttaatccaaaagaatggaaatcaggatcccaaacaggtattagcactcccatgttcattgtggcaccactcacaatagctaagatatggaaacaacctaaatgtcaatggataaatcaataaagaaatgtagactatacatataatgaaatgtttttcagccttaaaaaagaatgaacataatatgtgacaacatagatgaaccgagataacattatgctaaccgaagcgagccagtcacagaaagacaaatacagcgtgattctacttaatatgaagtatcaaaaatagtcagacatatataatcagagggtagaatgctggttaccaggagcttgggggaagggcaaatggggagttgctcttcaatgagtgtaaagttttagtcaatgccagatgaacaaattctagagatcttttgtacgctattgtatctatagttaacaatactgttttttatatacttatttaagggattagatctgatcttgtgttcttaattcaatacaaattaaaacaaaaacaaaaactcacttatcttcttcatgcctgatagtaaactttaaactgatacctgtgtagttatgtatgtactcacatgtttaacaaataattatcacttccttattgatgtgcagttgctagtgggctgtttctgaggtgcattcagacgggatatattttctttctaactcttatgggtgctagaggtggcttaccagaagttggagattaagtggtttactgttgtttctcgggtttgggacagaatccctagctcaaactatgaatattgacagattagattgatttcaggaacataagacttaattgaatcttcggagtaataggggcaagaacttggttaggaataaacaggatttaagtaattagaattatttagctctcctgggactcagtgaaacatcttctaaataagattctggaacttctctgtcctgtaatttaactgtggacacctgtgactcaatcctgaccaacctggcaaaatatctaattctttctcctgagattgtatctggaatcattcttgctatatcttaagtctataactcttatttttccttttaattattactgttggttttaaaattgtaattacaatataattcatattactgagaaaaatatctttaacagcacagtgattattgtaagtaattttttaaaaagtctttttcattatgccaaccccatttctcataaataatccctgttaatgagtttggtgtatggaatatagaagtggtcttgtgtttggattaacaaactaataagacatgataggctttactcaatgccaagtttaagggcacaaggcaggtaataaagcttgataacaaaattagtgaggtctgtcatttcacagtaattgctttcaaatgtaccagtaagtccacattttggatatgcttttccagggaagccattgattttggggtctctttagtttttatccctttgtttccttcggggtgccagactagggaccattttccagtgcaggtgcatcttattaatgctgatggccgattacttgatctacaaccttgacataaagacctttccctgatgctttcttggatttggtatgttcctataccttccatgaattgctattgcaaggaagatttgaccaaggttattcaaactttaaaagtaacaatatatctcataacagataatatactaatacatataagatctaacgtttttgttggtagtaaaataggaccatggtatattttatcagtattcagctgtgggcagtataagtttgctattagtttttcatgattacacatactgtcacagcaaatatccttgtacatatttccttgtaattttgggcaagtatttatgcaagctacatagaatttctggataaaaaggtaaacacctttaaattttttataaatctgccaaactgtccctcaacgttatagtctcatcaacagcgtgtgagataatgtttcctcctgcaccttccttctacttttatttatgttgtctctctctagtccctgaatttttgtgtgtgtgattttggtaggatatacaaaatgatcttgattttgcactaaaatcagaatgcttaggattagctcaacatcataggactaagtggctgatctagactagcactgtctgtctctcgtattctttgagttaactgaaactgcagaatctattttgttttattctcctactttaatatttggaactaatttataatctactttgcagaaagtgaagttatttcaactcaactttattccaaagaaatagggaactatttgaaatagggaactaacctctgcttgtgcctgaagctcttcattatttgtcagtaatgttaacttatgccaagtaaaaaaaaaaaaaagttaaagatgtatttcacctacttacgggttctactaaaatataaagttgctgtagaggtttttaatatattttagtcttcatctgtttatcagcctgttgcatggtaagtaattgctcaaccattgaagttatggtatgtgacaaatctgcagaaattttgctgtataagccaatagaatttttacattaaaagataactcatgcagtaacttctattcattaaagcttgggacaacttaaatgatgataaagtgaactttttttaggtagattcattacgatttatcaaaaattaaagaatgtcctctacttctggttcctttagttggtcactttctctaacagtgatattggtttacacatttttcaaatgtcgctgtgtgtgaacttatgccaatgttgtttacaatgtgttggaaacatttcatttttcaaatgcagttttatttatgtttatagaaaatatttgaaactggtgaaaacctctttgttaataaaatgaaggagaggtagaatacatttttttggtcatgctttattgaaaacaaaatggttttagggacagactggaacttgtttttccttccagatggattgaatccctactctcaacctacaagcactgagaaaatagtctaaacatttcatcatgcttattttagctccctttgccatttaaagcaggaatagatgtggacaaatttacttcctatgatataggtgtttctctttttatacactgctcaagaaatatcaatttaaaggtggatgttggaaataacaggcattagcgttttttctattgtaaaagtaacaatgatcttagctgaactggatttattattagcagttttacacatttgcccgctgaaattcatttcttctttccttgtcttcctcttgcattttggtgacttctttacagccctcaccacagtctacagtgcattgcatgtatttgcttctgttttcgtgtttttcactataatatgaacccagagaactagatctgtttattgttcatctttttatcttatgtaagcctagcacataataggaatacacgttgaattcaaccgatctttgcaaaatggtgtaatgtgaaaaattggcaagtcattctatttgataatccttgaccattaaaaactactatttctgagattttcatattactttagtgaatcggttattacataaaaatattccatacacttgttagttttgtttacagagaattgttttatattctctaaagataattaccgatagtttaccatctgtttctattaacgagtcctttctatctccctaatcacttgttttgtgctatattttatacgtgaaatgatctctgttttttagcttttgatggttttgatacttaggaaatgtgcgatatcttctgtgatcttctgcaagttatatttgtgacataatttgaatttgagtgtcactccttactaggaaatgtgtgttggtaatttgtaaaatgagacatcccttttagatgtctttataaaaactcttatttttgttttttattttctaagtagataaggcttttcttttccagaaacacaatcttttcagatttttttttcattctgacaaaaatggaaaaagaggactcaatgtttattgaatgcttattgtattcttgtatcgtaatgagcactatatataatcattaagtaattacttaataaccttattccataagtaatatgcttatttactggtgagtaagctacagagaaaatgaatatttttttttccacttcgcctctgctttatttctcatgtaccatagaacacagaaaatagtcttacatatcatggataagtggaaaatacattggaacttttatttctgacaatatagtcaggtagatattctttaaatatcccatccataggaaaaggattttaaaaaaaaaaagataaaagaaggtatagaaaatattagcaacagattatcagaaaagaccttgaattgaaaaaagaatcaaatagaacttctttaaaaagaatcagtaagactataaactttaatgttttaaacaggtgactagacataattgcaagagaggtttgaagaaattacatgcatacacagaaagaaaaggtgatagaagcgacacagtttaagaaatgtgacattagtgggtgcagtgcaccagcatggcacatgtatacatatgtaactaacctgcacaatgtgcacatgtaccctaaaacttagagtataataaaaaaaaaaaaaaaagaaaaaaaaaaaaaaaaaaaaaaaaaaaaagaaatgtgaagggcagaatgagactgtctaaaaatacgtttaaatggagagtcagaaaattgatgcgtagagagaatggaaggtaggaaataatggaattaaaagtggctaagaattatccagaactgaagaaagtcatgggtcctcagatttaggaagcacattttgttgttgttgtttttcagacagggtctggctctgtcgcctaggctggagtgcagtggtgccatcttggcttactgcagcctggacctccccaggctcaagcgatcctccagctcagcctcctaagtagctgggactacaggtgagtgccaccatgctcagctaatttttaaaaatttcttgtagagacagggtcgtgccatgttgcccaggccggtcttgaatttctcagctcaagcagtcctcccgcctttgcctctcaaagtgctgggattacattcctaaggcctccacgcccaaccttggaagcacagttaattccaaataagctacacgatggtgaaattcggaaaactaaagacaaagggaaagtcttaaaatttgccaaaaagagaaaacaggttagatacacaagaatattggactgacagcggctttctgaaagtatcagtgtaccaatggcaatcagaagccaatgtactaataccgtcaaatttactaccaatttacagtattatttatactcagctaatctattattccagaatgaagctgaagtcattacatttgcagccacacggaagaggagtgtctttaccaccaagagaggctcattaaatgtacattaaagctgggtggggtatgcaggtgtgaaatgtcaggaggtggttaggtcccctgctgagatttcggaccattccatcctatttcaaatactttcatacgacatcttgccctcgtgggtggattaaattcaggggaaattcccacaatggaaactgtggatttttatttgtttaagtggtcattttctagcatctattattttacagtttctaaaacaaatcatgtgtcactgatctttttctagaggctgtactcatctgaactattttgtatttcaaatacctgaggaatacataagggaaagtggctgtttgttttctttccctcaattccgcttacctgtgccattaattttaatttcaaagaaaagtagtttctcactttgtttgtcaattctgagagtggactttaataaatcggcttctggcttatttgcactggttagaagatgcttaaagtggagaccctgtcacattatcttaggcctctagcaaagaacctgctagtttgatgcctaacaatgttcattctgagctgatgctaagatactaaatatttctatgaagaacaaaactcagaaaggtagcaccagcaataaaaatagctttccatggactgcaaaaacttcagggagcagttgataagcagcatcaaatccgagagcagtagcagggagaaatcatgcgaaaggaggaggccaaggcccaagttggagagacagcaggatttatttgattaccttagcatttccaagtttcagttaattttgtaccaccttcacaatttttacattatgctcatattatctagattattatttacttatattttaaaataaacatttatttttaagaggaaatgttttaatcaaaataaaaattgaaacccatactacatattgtaaatcaaaaggatatgtaaaaattattaaaaggagggaacacaatgaaaaccatatcctgccgggtgcagaggctcacgcctgtaatcccaacactttgggagtccaaggtgggtggatcacttgagcccaggagtttggaaccagcctgggcaaaccctatctctacaaaaaatataaaaattagcaggatacggtggtgtgtgtctgtagccccagctacctgggagactgaggtgggaggatcacctgagtccaggaggttgaggctgcagtgggctgtgatcgagccattggactcacgcctgggtgacagcgcaagaccctgtctcaaactgcaaaaacaacaaaccattttctgttgcctgtcatagagcctgaggcctatcttctgttataaaaaggaaaaaaaatttcaagaaacattgaagacatgctagcaccgtctacagtcttctcctttatttaatcaaaaaagatgcaaagcctgggcgcggtggctcatgcctgttatcccagcactttgggaggctgaggtgggtggatcacctgaggtcaggagtttgagaccagcctggccaatatggtgaaaccacgtctccactaaaaatacaaaaatatgctaggcatggtggcgcatgcctgtaatcccagctacttgggaggctgaggctggagaatctctagaacccgggaagtggaggttgcagtgagccgagatcacaccactgcactccagcctgggcaacagagccagactccatttcaggaaaaaaaaaaaaaaaaagatgcagaaaggaaataaacttgtcatttgtcatgtgcaatatagaattgtttttagtaccagcagtgtcaacagatgaatgtgaaatgattcacagaggttagcgtgactctgtgcgtctgagtgcctgctttttagtgatcatcatttgaaagatattgctctgtgcctcctgtattgaaatgattttgttctttctatttgaagctcttttaagagcctgtgccgatggaggtgccaaccgcttatatgatatcaccgaaggagagagagaaaggtatgctttcttttagtcaatgtgcatagtaccatgaatttctgctcttctgttgttttattttcttcttgtaagtggacattgttaattctccttcagactcttttatagaaaatctcctcagtgagggaagagtaacctgagctgcttaaccatgttgtattatttcttgctttgaatggtatctcttagtagaatgaggcccatctattcttattttaaaaaccttcattctgctacttcaaagccacattaagtagcattatcagatcttgatacttgtgagaactgtgaaagtcagcttaaataaaacttcaaattgcaatttgagatgttattcaaacagtgtaaatgaatgaaaactgattttatataaagtagatgtatattccctcatagaaaatatgagattttatattagtgttgagtaaagcccagtataatttaacttaattatttctcagttatgcatacacttatatgttaagagataaagagtttccttaagatttactatccctgctgtctgatttgtcttatctgtatgcggtaaggtatttttagatacgacagtatgtttgatggaagtagattttaaacctagctcattgtgaacatgtttgtagtccaaacaccttggcaaacacaagaatttatagtgaacatataagtagactaactatgaaacatagtttcatctctatcatatgtgttattatattgaaatgtttatagtttaagaaattaccttcttggtgcaaaaaataaaaacattatgatgtaacacactctaggtacaaattaaatatatgtattttgaaataatatatttttctttatgggatgaaaaattctaacactggagctgctttttgaaagcagccggtttcttataggaggaaggcatgtttccttcgagactggacgtgctaatgctaatatctggggactagatgcattatcaaaaagtatagcaagagtgacagccaagaagacagtttaaattcttaacattttttgctccttcattttgtaactttacagattcctctgacagtatcctccaagacctgacatggacaatgtgtgaaaaagcgctcaagtatgtgttgtaaaaaaagggtctaggccagttacttcagataagagcataatgcccatgaggccaagcttatgtattgggcctgtagcctgcttgctggcaaataatctggtgccaagtattctctcatggcaggtgtagcttgtgaacgtaattgtaaccacaactgtgaaaggatctcaacactgtgccttccaagtgatctttgatcataagatctgtcgataatgcttgtgaagaaatatagactctcatattgattatttttactgaattggagtggacactaataaagataacagagcactttaaaaaatgatttcaacttttattttagattcagggcatatatatatatatatatatatatatatatatatatatatatatatatatatatatatgtagttttgttacatgtgtatattgtgtgatgctgaagtttgggatatgaatgatcccgttacccaggtagtgagtgtaatatccagtagttactttttcaacccctaaccccctccctccccattctcatagttaccagtgtctattgttgccatcattatgtacatgagtactcagtgtttagctcccacttataagtgagaacatgcagtatttggattcctgttactgcattaattcacttaggataatggcttccagctgcatccatgttgctacaaagcagatgatttcaaacagaacacttttattcatatttgaaagcaaaacagattaccagatttagggggtgagtaccattatttttggcccaaatttcaaaataaccacgtgtgatgtttctcaacacatttataagtaatcttatagaagtcttccaagaaaatttatataatttaacaactgtttgttcatgtatgaagatgttcaataaaacattgtacttttcattgattttgtaattgtaattatgtgtttgcaatgattcctactctgatgcccggggacatcgctggcctgggtgagggtagaatctctaataggaagatgagtgaaactaactgtctcatgtgggaattaagtccttgaatcaacctctaaatacaaaccctaaccagtcaaactagttggattcaggtgactaagcataattcctcttaattgtatttctaatagaaaggcatcacaataaaaaacgaaaaaatatgcatgagttttaaaaagccagtatgtattttgtggaccactacttgccctgttcttatttatttacttaacatccatatgtacaatgcaatgcctcataattatgtgataaaacatgaatttttaaagaatcatcttcagttgaagacaaaatatttgtacattttgaatggaaggaaggaagacatatagacagtagcagaggaacaaagtttacagaggagtggagctgaaggaaaaatcagtcatgggaccttctctcctctgctcaggctgaggagtggcagggcgtgaggccccaggccccgtgtcactctgcttctggatactgctggacattgaggtccatctctgtccctcatggagctagggccctaggagagcctgaagaggacccaggtgtgctccaggcccctgcctgggcctgctggcccctttactctttcatggacccagagggaaagggaaggttaaagtgtggcaggtgaggctgttgggacccatggggagatgtgtgtagtaaaaagaagactcagaaaagggtattggatttggccataatcagcaagtagaaacatagtgcccatttatcctgcagcccagaaagtccaagattagacaacggaagcatagtttatgaagtagaggtgattaatgttcttctgttacctgctttcagagtactgaattagtgctcccaaactcttggcttatacatattagataggtttcattttattacagatatgcagatatcattgttttcagtgttcaaattgtctcatctttggccaatataaacttctttaagttagatcctatgttctttttaaaaagttacctttgtatacatatataaaggttatatatatgtatacacacatatatataaatataaatcatgtgtattatataaatcacatatataaattatatatatgtaatttttaggcatagttaatgtacaataaaatgcatatcatagatgtttaattacatgggttttgttagacatttatttacagcctcttatctaccatccaaaacgagagagaacatttctctagccccagaaaattccctcatgattgataatctagttttttacccccagtcaactactttctgatttccgttactatagaacttaaaaaaatctattactgaatttcgagcaaaataaatcatatagtatgtattcttttgtgtcttttttcttttgctcacatgtttttgcaattcatttatgtattggtagttcttttttattgctcagtagtattttattgtatgaatataccacaattacatttgtttattcaccagatgtacatttggttgtttccagtttttggctattatgtgtaaatgccacttcttatacaagggtttctgtgaacatgttttaatttggggaagcaggtacaaagaatgaagtttctgggtaacagggtaaatatatatttaactttctagaaattggcatttcacttttccaaagttgttataccattttatatttccatgagtaatgtctgtattgctccatatcctcaccaatatttgttcttttttatctttttgattttagccatttagtgtttgtgaatggaatttgtgattttaatttaaatttttctgataactaaggatgttgagcatcttttcatgtatttattgaccattggtatttcatgacttgatatataatagcttgtaacacaattcttatttgttacttttattaattaaaaaaacagctgtgagcttaggtccagttctatactagatgtgtgaaatgcttgcacaccatctttattaaaattgttttaaaattgtggtaacaaaacttaacatgagatctacctcttaacaaattttcgtgtataatacatattgttgactacagatacagtgttatacattagatctccagaacttactcatcttgcttaactgaaaatttattctcattgattagtaactcctcatttctcactctcctccacccctggcaaccccattctacagtttgattctatgaatttgactattttagatacctcagatgagataatcttgcagcatttgtctgtctgtgactggcttattttatgtagcataatgtcctcaaggccattccatctttcataaacgtctgtctctgtttcaactatgaaagtagcctctcttcatttatcaggttttgttttgataaacaagccctaaatattttttcttatcgtgaattgcagtgtatctgttaatatctattggttctgacctgtgggacagtaggacatatgattaatttttctgtagttacttgttaagtggatgcaagctcagtaaacataagctccctggtgccattcagtatgacagattatatgacataaagagaaaattctagttcagtgtgatagattctgtaacaaaggaagacatggagcaaggacagttatatcagagtgaaggtattaaaaaatattctgaggatcctaatgggctgtaaaagattaggaccatagagcatgtgaggtatacatatgtgtgtgcatttgtagcgactggggagaggcagggagattctcctttgtctcctggatgaaatctcaattaactaccttgagatgcagggttatctttttaggcatgcccaatttcttcccttgtattctggtcaagcagaactgctcactgtcctaaatttgccacgcgctttctcccctctgactttcctcaggccctttctcatggctgatctggtacacattagccccacccatagtccattacaattgtgcagccattcgaaataatcagtgatggtagatcctaggctgtactcattcttagatggtttcagcagcatgtgccagcatgttttgtaacagtcgtatccgtgcatcagtgttcaactaacacaccatgtactccaggagggctcctcttcccttccagcctgaagtgatttggcatttcctacactgtaataatactcttaaatcacaatgttacattcacattttaccttgatttaaagctgtaaagacttatattctgtactaggttgtaaatttctagtgatctattgccctttaactttgcataatactttgtaattatttactttcttattttatcttgtgatttagctacgggtagatgtatcttcttcactaggtggtaaactcctggaaggcagcaatcataattaatcatctttatatgcttcatatctactacactaatgagcatttgagaatttattgaatttgtgatttttccttgatatgttagcagagatgtaaaactgagttttgttaagtcaaggatttataagatacaacaccagctattggaagtatcttgttgttaaagaaactttcgataattatatatcttattagtattataagccagaaatggcttatgtctaaaaagattgtgcatttttgtccaaagtcatgtatagtatatatcccacttatttccagaatatcttatgttacgttgcattctaattcctgtctaaatgaatcttttgtcctggaactaaggtcctggcttttgaattcattggtattttgagagcaatatgtaccatgaatatcagtgctaaatgtgaggttttttttttatttgtgattttgtggtacttagagattctcaggctcatcagcataacagtctaagaagttgctatatctttaatattgtgtgtaggatatctgaaatgtggggaggggtgtttttaggttagttttctcagagtaattaatgaatatagaatcctgaatggaaaggtctacaggagagtatctttatataaacattgttcaaagttagctcaactgtttaggagttttctttctctttaaatatgagcacctaacaaaaattcctagcactcatggaaatgacgacataattaaacactcattaccaatggcaggatgacgagggcctatttaaaccgaaaagcaaaatacgttcttgatctctttttcctctcacttcattaattttctcacagttaaaatttcggtctttgagctttatataatcatgcaacttactcatcagatcaatctactttttagattaatcaagtgtgaagaggatgactgttgtaactctaactctacaactatttgtgccccagctaaatgaagttcaaaatataattaaaataactgaataatgtgggaggagagctcttaagaattagcttctaggctgggtgtggtggctcacacctgtaatcccagctctttgggaggctgaggcgggcggatcacgaggtcgggagatcaagaccatgctggctaacacggtgaaaccccgtctccactaaaaatacaaaaacttagctgggcatggtggtgggcgcctgtagtcccagctacttgggaggctgaggcaggagaatggcgtgaacctgggaggcggagcttgcagtgagccgagatcgtgccactgcactccagcctgggtgacggaacgagactccgtctcaaaaaaaaaaaaaaaaaaaaaaaaaaaaagaattagcttctaaagcctttatcaatacaattaacccaggcatctggtagtagcaagtgtctgattactcttgaaggaatcagtgaatcagtgacagtctaagtctggctacctgtgagtaactttgaacaattttgttttatttcattgcaggtagcagcaccctccagaagggacattatgtagtcagagagttagattaaggttcaaaatcgggttctgccacttcattacttttagcaagtaatttaactttttgggctgtagtttcttcatctgtgacgtttcaggaagagatcactttcttttggagtattcagagaaatcttgatgaggtaacattactgtggctgattacagaagatctggataaatcaagaggatggagcatggctcttaaaagctataatgataaattattgaatagttcagcatgtacctgatgtagttttaggccatagctgtaaatatttttgtcatggttaactattctgaatgtaataattgtattacttttcagaaacgttgtaagcatttttcagatagtggttggcatataggaaggtagtgtttggcatctgatttcttttgttttaaatccactttgtttagctataatttcatacaacaaaattcatccactttaaacatacagttcaattatttttgaagcgttatatagttgtgtacccaccaccacagtcgagattaaaacacgtccatcatcccagaaagttcctacctcccgctttgcagtcattcgcctcctcccacaccgtgtcccctgtagacttctagaatgtcatacaaatgaaatcacacaatttgttgtcttttctgttatttttcacttatcaaatgcttttgagattcatccgtgttattttattcatccatgtattttatgtatttattatgttattttatgtagtttgttcctttttgctgtcgagtagtgttccagtatatgcgtataccacaattttctttctttattttacacagttgatgaacctgatttctaaaagttgcctttttgttgaaatttgttatcatttttttatgtgcttctttggaatacatgttcttttagttggaacaaagcaaaattctcagtgttttcaactcaatcctagacattatataaaatagtagtaaagacttatatgtaaggtctatatttgctatatcttagtaaaaagtatataaaagcttgttcaattctgtttttaaaggagcaagacaataaacatgaaatcagtgtgaagtaagttggtgtcaagtatctgagcataagttgtgatcttgataacctccaatatatgtggcagttgatttcagtctctctatgactaattttctcattgattgtgtttttttttttttttactgcttttcaagcctctcatggaatagtcaaaacatgtaatttctatatgctttaacatatgcagaaaggaaacaaatatgaaccaaagatctttggttcagttgattcttataagcctagccttagcaatgattagtcatttgcttcagtaaatttccattaaaaagtatttatgcaatcaaattaccaagctgtgtaagcatgtcaacattattaggtctttgaatcaaaatgatgaaaggtaaaaatgattagtgcatttaaaatataatttacaacagaagtcttggtattaaagaaccttacacaacaaaccgtgaaggcatatttatcttaaattattgattagattagtttagtaatatattttagtctgttcgttatcaaatgctataaatcagaggtctcaaaattatccatgcatagctatgaatcattttggagtgttagaggagggaggaatgtgtatgcgaaggtgctatgtttctcagatcatgcatgaacccaaaataaattttcagagcgagaccattttaagcagctgcaggaagtcagtttacaactaaatttaatcagaggcattgttttttatggctattctatttcataaagtatgttcctgacagaacccttttcccttcctgcactgtggatggagtcttcagaaataaattatcttccagtaatattttagagaatgctagatcatttgtcaaaagttttgagtaacgtggctttttacattttactttttttaaaaaaaatgttgaattgttttagtgattgttaatataagagctcatgttttcttgtcatgttttaaacttatttttaatagatttttagatcaatgagttaagaagtgatggttgaaagtaatcacataataccacaccaacaaaattgtttcttaaaaagttgtggaattgtccctgtctggtttttcatacacacttatgtgatcgcacatacaggtcttcttgcaaatacaccctcggattcttcctgcctggttttcttgttattaagagttgggatttgtattatttggccaagagcaaacagaataactccaacactaggcaagatgacttatattatttgttgacacgtcactatagggcaggacattttagttgatgataggattgcaactgagctatccacggtcttccaattgttggggaacagaagtgacagctggaattcaatttaagcaagggctagtgagtaaattttatgggaaaatatccaaatggcaattacacaaagatgagcactgaactatcacttacaatgtggggttaggaatctgagagttgtttgaggtgtattccttaaagacttcagttttgctgctgtagccagcaaggtcaagaatatgctgaagaatctcagagagggcatttaaaatacaacagaagatattacaccacactaagaaaaaagtcattgtgtgtgtgtacattatatgcaatatacttaactacactatagttaactctggctttggaagtagaagagagctagagaaagtcagaggaagggaataagagtgcatttagtgtatcaatgactagactaaaaggaactaaaataaaaaatcgtaaatattaaaaacgctgactcctctaaatcctgtgattttgaattgcaaggagcacttttgttgaatgagactaacaatgcttctccttagactacagggaagatggtgttgtccctctctacagggcttagaccagggaacactttcttttcaccttggatgtcaggttccatctgtttctgctgggtgtcatgtaggggtgctgacacctgggtgtgatacccagggctagaggagccatgtggggagaagatgtgtatgcattaacactgtttaaaagattatttaaaatcttggtgccatctaaatgttgaaaaaagcctattattttcaagccatcggagtgcccttggaaatatcaaggagcaggttttaggtacaactggagttttttgtttgtttgtttgttttttacagaacactatgtaattcatttctaaaagcctcctgctttcttccatgtgttatgcatcattatctttcaaaactcagcccatgtgttgtgtctccccagaaatcttagttttcacagacccaagttaggaatgaattctctaagcagtccttcactgtaatgtcacatgatgttgaaattatccatgggtgtttctatttaattgggaaaaattccctgttcttgttttactcatctttggaaataatcctagcagctaggatcaggtttgataactaatagatgataagtaaatatttttaactaatcagcgttactccttttagacaattcatactgaaaataatttccccacatattcaattaagcaagtaagtgacaaatcctaaataaactaagggtgtttcgtggctagatttcttaccttaccaggttatattacattattattctgcatctctcttacgtaatttgtccttgaagttctcttatccagcacttctattatcaaacatttatcacaacgtattagaatcacctatttgcaaattcccaccagcctgtaacctcagtgaaagcatacatttctctagcatttttactgtcttatccccagcaattagttcttaactatgtgcttaagagttactaaagaatgattagaaatactcatcaaaacttcatatagcctactgtcacagattgcagtatgaatgtgtgtttccgacccaaaaaggtaattcttaagattatttttatttaagaggagaatcagagacctataccaaaatctcttctgttaacaatattgggacttatttaactttttgtatttgtgtgggtttttagttgtacagaacaagaactctggccaacgtaaacaaaaatcaaacatgatataattaatagagaaagtgggaaggctgggggaatatgcaggaattgggaggcttgggaaacatttaggaatcaagggaagctggaagccagatccacagctatgcttgcactctaagaacaagttaggacttgcacttagccacctgtgagccggccactgggtgtactacaggtgaattcctgtgtctcttttctagtgtaatatggtgttcaactgagttgaggtggttctgagagaatatctgcccatgtccttgtttctattggttgtgtttgtttctggagtgggatttgcctccggtcaagactgagaccatgctagtttctgcacgcctaagtgggaccagccaactataaatacaaacaaaaaaaaaaacaaaaagaatcctcatgcgtatacatcaacagcatcttttctctgctgcctgtgctgtcttcttgccctaggatagtctaatggtctttattaatctcctccttacttctgcctccccacacacgtccctaacttactggggtataaaatgcccctggttgggaactgtttttattcctcactatgtaatgacagtgaaagggaatgaaatggtcatctgtcatgcaaataagtgacaaaaatgcctcttgtgtattctgagaaatttaataacgttctttgcaaatttaaaaaagtatgtaggaagtataattcctctttagttttataaaattttttttaatcaaaagattcttgttttctgaattcatgttacatttgtttccaagtaaactttaaaattttactcttatgattcataaatttccagggagagggttgtaaattttttttagatatcttttgcatttaaaaatatttcccccctcttaatgaaatattaccaagacaagcttatattttacaacatagagctttctttagttggtttgggtctttgtgacaacaaagtgagagaataacattatttttctaatttgtaatatctaaaaaggttttattacttaaaggtaaggctttaatttaaatatacaataataataagtttttacaaaatttcccaatatgaaaatttcccagatttagttcttttgttaaaaaatatttaaggcgagaaataattaagaaaaaaattgctttgtggcttccagcacagtagttaaaagggcagctgaagcttaggagcttagtatgcagttttctttgtagaactagcagcattttttttccacttcatgcaaaattcacttatttatcactagcggcctctagtgtatattcaatttttttttctgctcgactatacattagttggttattagtaactggagagctgttccatgtgttaggaacaagaaaaacaactccagtttgtgtcatcttggcattttatcagtcagtaaaaagaacatttttgcataatagtgtggtcttatgattcctattagcagtaatagggctttcccagcgacttttctccatgtggcagttgcttgccaaagcttaattctgatgtgggaggagagagttagtgattatgcattacactgatgccctctaatgcttttaataggatgcaatcaagtaagaatacaggaggcaaggattatcaaagtgagattttagccaaattgtgtgacagaaatctgaactgaacttatttattttaattgagcttatttgttcaattttaaataaaaccgtattcaagtaatttttgatgcagtcataattacaaaatatataaagataaattaaacacctcgaatttgtatcatttagtatttacctttcttttaaactttatatattttaaaaggcaaattctctgctatcgcctctaacttttcccccacctatggacataggattattataatgaatttggggaatagaggaagacataaagaaaaaagttaaaataacctaaaatcccacttctatagataacgtctgttaatatttttacatatataatttttttcaattttacatttttgtatgtttattgctctgtgtatgtatgtgtgtacatgtaatgaaatacagatttttatctatatattgctttatatcatgcctgtttttaacattatattatgaacatgctaccaagtcattatatataaattttgttacatttttatctctcaaccattctccatatatcagaaagttatgtagctcataagttgtgtgttttttttttttttgagacagagtctcactttgtcacccaggctggagtgcagtggcgcaatcttggctcactacaacctctgcctcccgggttcaaatgattctcctgcctcagcctcctaagtagctgggactatagacgtgcgccaccacgcccggctaatttttgtatttttagtagagacggggtttcgccaggctggtctcaaactcctgaccttaggtgatccacccactttggcctcccaaagtgctgggattacaggcgtaagccactgcgcccagacagcttataagttttttataagtaaatctttggtaaataaaactttgttaagtattataaaaacattaagtagtattataagtgtatgagtttgtgacacttacagtagtttcacagacgttaagacatgctccagaagttataaattttaaaaaatgtatttaagtctaagttgacaacttgctttccagaatattgttgcttaagttaaccttcatcaacagtataagacaatttacatttctctctgctcttgccagatttattaacttaagtttttttgatatattatgtaggaaatcatattccattattattttagcatattttaattatggagtcattctatataacaggcattattgtagtcacctatgatgcagcggagagcaaaatacttgacttcattgacctcccatagaggaaataagcaagacaaataattaaaatattaagtatattactagtgagaaggagaataataacgcaggagaagaggtagcatgctttgcagtaggttgttagcagttaaagtgagggagagcctcactgagcaggtgacttctgagttaagacctgcagggggtggagaagcaagccatttgctcagccaaaggaagaaccttccaggaagtggggatgcttgtgcagaggccctgagacatgagaatgatatcagttagcttttgctgtatcataagctacccccaaaattaatggctttaaacactgatttatttatttactcacaagtctaaggtcagctaggcagatcttgtgggctcattcatgtgccagttacgtgggttggtaaaggaaaactgttcctgtactcacaacacttctgccactaaacatctgggttttatacatcaaacaatttgccagttgtctgtggccaccaactgggtgtccgacaatttaattcaatctgacattattcagagtaagcacagaccaccaccctccaacacacacacaggtaaaggacttagtcctactagattgccatgcactttaaatgccagttgcaactagtgggtccccagaactccctcctcgtgtttggtaatttgctataatggctcacagaactcagggaaacacttatgtttacaatttattataaaaggatgttataaaggatgaatgtgaacagccagctgatgtggtacagagggtgggatctggagaagtcctaaggcaggagcttctgtcccccttggctttgggatacactaccctcccggcatgtggatatgttccccaacctgaaagctctctgaaccacattgtttagggtttttaaatgggggttctgttacatgggcatgattgattacatcattggccatcggtgattagcataatctgtagctccactgggagtggtgggtatgaacgttccacactctgatcatgcctttgtctttcttgggtatcagcctccaacttgaaactctcctcgaggcccccagccaccagtcatctcatcaggacaccgaaagacacccattactgtggagcttccaagggtcttggcaactcttttatcggaaacgagaggtgaagaccaaatgtatatttcctcttatatcatgatatcacagttgggtaggcagttttgttgatgatgtcagcatgtagaaaggacccacatgtttagaggttggatgtctgtaagctgtacctgactccagtctcatcctccatccatcaggcatgctcagaattactctcatggtaacaggggagggttccaagagagcaaagggaaggctgcagctccacttgaagcctctattcctaactgccatgctgtcacttctactgcattttttaagtgaaagcaggtttcaaggctaatacaaattattgaggtggggaaagggatgcatattaatagcttgtgatgaaacagtctggaaagtcacattataaaggggtatagattgggaggaggaaataattatggataattgtgcaaacaatctgcaagtggagataatgaggggaacttactaggaaggagagtgatcagaaagataacagggtagatcttaaagttcctttgtagatagtattgatgatttactatgaatgagatgggaagtcactggaaggttttcagcagaggaatgccatcagctgttttttcaggattgtaccacggaggatgcaaagaaagagccagattgagaatgtattttcccctatagaactggctgacaaatcagttactaggtgcaagaaagaaaagtgaaggatgactccaagaaaagtcaaggattttgaactaaacaactagaaaagaatgatttttccttagattggggagattgtaagagtagtggttacagtgggggaaagagaagagattcagtgatttaagtttgagttatttatccacctcacattgagtaggttgttggatacagagtcatcagtatatagaaagccatataaggccatgagacagtgaaaataacctaatgactgcagacagtacagatactgagctgtggaatactccagtgttaaaaattccgagggacaaagcaggagtaacccatgagttaggggacaaccaggaaactatggtcatggtccttaaatgatgaaagaaaatcaaggaatacagagtgatcatttgtgttatatatatctgatgggtaaagtaacataggataattgaccattagatttagcaatatggaagtctttggcattggaaaatatgtgtgtgtgtgtgtgtgtgtgtgtgtatgtgtgtgtgtatgattagagattatatatctgctatttaaattccttcccttttgtgtcatgtcttttttctatttcatttttcctatatgattttattttcattttataagctattgggatcaactctgtttgaacaaggatactcaccctttgtcttttgtatttcttttaaatgtttttcctaatattctttttaattttaataatagtcatctcatgattttatgatttctgggtggcctgtacccaagccattatcatctggctgcattcttttggattcctataatgcagagatcagtattaaataccgtagagaaccacccatgctttagtctctgtcttttaggacagtgactcatacatctatataatggatggcagcagcaagataaaaacagaaactatccaaggtagaaaatacagtacttacttcaccaagaaagtgtatgccataagaaatttctttttcgtgtgtttgtgtcattttcttaagtaaggttttagttcctgctgtgagggaagctgtattggaaaggcagaatcaagatgaaaaacactctactagcagaaactgtagctaggcagcttattactctttgctttggaaaacttgggaggatcagacaacctattagtgaccctaatggcattaatcactagctgtatttattgaattctgtggattatgtctcagctgaatcacagagagaagcataaagcaaacaaattacacaaagtaattcactatcattgagctagctttttatatttgttaaggtgaagaattggcattaacctataaatatactttgggactctttcatgtttgtaaatcagaaaagatgaaaccttccactctggactacataggggttagcatgagtcttctaaatgtatatatcgcattttctggcactaccttaccctactgccgctaccacgttcttctaggaaaataactccgtaggttagtttctattaaaataacctttcattcttctcaccccttctggcctctttcggaaaacaaataattacaacaaatgactgaagaggaagtgacctgatgttcagagccagaggaaatgtttacttgtacaacttttattgaatacgttaatattatacaaagctctattttggggctaagagatcctgcaaagtcactcattctttaaaaattgtagcatggctagccacatgtaaatacaagtgattgaatgagaagtcagctatgtcttagtctgattgggctgttattttttttttcttcaacttttattttaagttcagggattcatgtgcaggatgtgcaggtttgttatataggtaaacgtgtgccatggtggtttgctgcacagatcatcccatcacctaggtattaagcccagcatccattagctattcttcctgatgctctccctcccctcccctcaacaacaggctccagtgtgtgttgttccctaccatgtgtccatatgttctcatcactcagctcccacttaaaagtgagagtgtgcggtgtttgattttctgttcctgtgttagtttgctgaggataatggtttccaaccccatccatgtccctgcaaaggacatgaggacatggtctcgttcctttttatggctgcatagtattccatggtgtatatgtaccacattttctttatccagtctatcattgatgggcatttaggttgattccatgtctttgctattgtaaatagtgctgcagtgaacatatgtgtgcatgtatctttataatagaaccatttatatgtctttggatatatacctaataatggaattgctaggtcaaatggtatttcttcctctaggtctttgaagtatggccacactgtcttccacaatggttgaactaatttacacacccaccaacagtgcattcctttttctccttgacctcatgagcatctgttgttttttcactttttagtaatagccattctgactggcacgagatggtaagatggtatctctgtggttttgatttgcatttctctaatgaccagtgatgttgagctctttttcatttgttggccatatgtatgtcttgttttgagaagtgtctgttgatgtactttgccccctttttttttttttttttttttttttttttttgagacggagtctcgctctgtcgcccaggctggagtgcagtggcgggatctcggctcactgcaagctccgcctcccgggttcacgccattctcctgcctcagcctcccaagtagctgggactacaggcgcccgccactacgcccggctaattttttgtatttttagtagagacggggtttcaccgttttagccgggatggtctcgatctcctgacctcgtgatccgcccgcctcggcctcccaaagtgctgggattacaggcgtgagccaccgcgcccggccctttgcccactttttaatggggttgtttttttttttcttgtaaatttgtttaagttctttgtagactctggatattagacctttgtcagatgaatcgattgcaaaaattctctcctattctgtaggttgtctgttcactcttatgagcagttgtgaatggcagcttattgatgatttgcttgtctgcttgctgttattggtttataggaatgctagcaatttttgcctgagactttactaaagttgcttatcagcttaagaagcttttgggctgagacaatggggttttccagctattacaaccactgttttttttttctgtttttcacttgattggtgaattttccttcatccctttattttgagtctatgtgtgtctttgcccatgagatggatctcttaaagatagcataccactgtttcttggctctttgtccagcttgccattctgtgtcttttaattggggcattcagcccacttacattgctgaaaactcagaaagccagagtgcctcgtttcttccaaatgactgcaacacccctctaacaagggcacagaactgagctgaggctgagatggctgagttgacagaactaggcttcagaaggtgggtaataatgaacttcaccgagctaaaggagcatgttgtaacccaatgtaaagaagctaagaatgatgataaaaacaatacagtagctgatagccagtttagagagaaacataaccaacctgatggggctgaaaaacacaacatgagaaattcacaacgtaatcacaaatatcaatagtggaatacaccaagcagaggaaagaatttcagaacttgaagactatcttacttaaataagataggcagacaagaatagagaaaaaagaatgaaaggaatgaacgaaacctctgagaaatatgggattatgtaaagagactgaacctatgactgaggtacccaaaagagacagggagaatggaaccaagttggaaaacacacttcaggatatcatccaggagaacttcccaaactagcaagataggccaacattcaaattcttgaaatgcagagaatcccaataaggtgctccatgggaaaatctaccacaagatgcataatcatcagattctccaccatcagaatgaaagaaaaaatgtttagggcagccagagagaaaggccataccgcctacaaagggaagcccgtcaggctaacagcagacctttcagcagaaactctgcaagccagaagagattgggggccaatattcaacattcttaaagaaaagaatttccaacccagaatttcatatctggccaaactaagcttcataagcgacggagaaataaaatccttttcaaataggcaaatgctgagggaattcgtcaccaccaggccttgcaagagctcttgaagcaagcactaaatatggtccttttcaggaccctgaaatatttgtagtggcattaccagccactacaaaaacacattgaagtacagaccagtgacactatgaagcaaccacgtaaatatgtctgcagaataaccagctagcatcataatgacaggatcaaattcacacataacaatactgaccttaagtgattgggctgttgtaacaaaatattataaacagtgtggtttataaacaacagaagcttatttctcacagttctggaggctgcagtgtccaagatcatcgcactagcagcttctgtgtctggtgggggactgttttctggttcataaatggtatcttctcactttgtccccacatagtggaaggggcagaccgcctcaggcctcttttataaagacactaatctcacctaatcctcccccaaaggccttacctcttgataccatcacatcgagaattaggtttcaacatacgaattttggcggggggaggcatagatattcagaacatagcaagctgtgagctaagaaatgaagtggccttcatggtcttccttgctcctccctcatttcataccatttcttttacaaacacttttgtcttcctacttttctttctattccctgaatctgggtattatttttctctctcaccctcttgccatggcttcatttatttatttggacttttcttgtcctatcaattactaggaagcctttccttccttttctcttactagcttgctcccccaagcctggcacttcttgtgtgccactgtagcactctgtcaattacttatagtgtcagttccatgatggcctggcttgtctatccctactcttagacttcaaacctgttgggactgtgacaactattgtatcagtagtctagtatatataaaatatatatttaataaatatttgatgaatttgattaagtatcctatagatggaggattcaccagtgtgtagttttggctctggcctctcctgagctttccttctgcgtttgcaacttttagctgaacttggaccctgaaatattctacaatctcaaactctgtctaaaatattgttcttattcttgttatttacaagactcacatattggttttttttattttaaaattaagattgtatactgtttacataagagaatgttgagaaatatgattagaaaggttgattgaatcagcttatagaatgccatagtgacttgcctatcttataggaatagatggtggtggcttgttagaagagttttatattaaatcattctgcttgccgtgtgtttagatgggcagcagtaagccttaattaagtaaatggcaacccacttttctttttctcagcatctttcaggaacgatgaaagagaataaaatgactatagtccatgtgcttcagtgtaattataaattttgctttttggaatcacatcatataacacatgtgatttagtacagaaactatcttcacagaaactcctatttagttcttgccgtattaatcacctcagagaaaatttgctaggttatatgtagtacataaaaattaatgtattgtttattgtatctcatatgtagtacctaattcaattgtatacaattatgtgcacacagtttttgctcttcatgtatgtattgttaatattctataagttttatttcctttgtcctcttttcttagcgatttcatctttctttttctagagcaaaggagacagtacattttgggcaaaaagttgatagtaaattttaaactgcttttcatcaaaaaccttttttactttaggtttgctattgactttacctttttcttccttatatctcatccttccttttctccaactagacaggtcgttaaaaatgtaaactggttctctagactggacataatctcatttccagaagctgctggacacttatatagagttttctgaaccttgaaatcctagcaaagccataaaagcagacaagatattttctttcctatagggaaaatctgtcatcatgagtcgtgaaagttactgacaacacattctaccacctaaatgtataatactaaactgctagcattggagatacagtgaaatcatttctgataaatcatactaagcctaatataatagtatcttagcaaatgttacactgaatattaaattttttaattaaatttgtgattatgaaattactgttttatattaagaataatctttatgtaacattttaggtactgattaaaatttgaaattataatgtaaggcaataataaagtgactttttaaaatgtatctttttcaaaatttgtgtgtgcctgaactataaaatatttcaaaattagctgtatattcattaaatataattatgaataaatactaaatataagatctaactaaatatataatctagtgcgacaacttaaactagtgtaaataagtaggatacaatatgattaggaaaattaaaatttttaacttgctttaatataattggtttcaattaatatcagtattattgtgtacagtaaatccttaacattgttgatagttttttagaaactgattttaaccaaaatgacataaaagaaaacccattttaccctaggctaattggtatcagcaagagttaagttcctacagcatgtttcttgtcacaaaaacatcaccaaacttctgaataaagaccaaacacttctagtatttaacactgaaataaatatgagctatatgtacatttaagaaaaatcaataaaaatcacttctcagccttttagctaagatcaagtgaagaaagatcaatgaaaacaacaagcaagataattatttaccagcttatttcagttcagggtgatgggcagttggagcttttctgggcagctcaggggacaaagagggaactgatccaggacaggacacattctactctgaggcacacttacacacacacacacacactcactctcactttcacagtgggactgtgtagacagccagttcaccgaaagtgcacatctttgggatgtaggtagaaaccagagtacctagagaaagcccacatagatgtggtgagatcatgcagaccctatacatttaatggccctagccaggttttttcctcatcaaccttataaggaaatgaccttgaatgaaaggacgttattcaaggatcttgatactgtttggctctgtgtcattacgcaaatctcacctcgagttgtaatccccataatccccacgtgtcaagggtgggaccaggaggaggtaattggaccgtgggggcggttcccccgtgctgttcctgtgatagtgagtgagtctcacgggatctgatggtttaataagcatctgtcatttcccttgcttgttctaactccatcctgccaccctgtgaagaaggtgcctgtttctcctttgccttctgccatgattgtaagtttcctgaggactctccagcaatacggaactgtgagtcaattaaacctctttcctttataaattacccagtctcggatatttcttcatagcagtgtgagaatggactaatacaggcctgctttatataaatggaggttttaaagcctcaactaattctgatagcagtcatagtccattctagagagtactaattacagttgattactttgaagaagggagaaaagagagaaaggtatgtgttagagaatatacttgttatgatttcaaccctcttaaatcgattgaatcttgttttatggcctaaaacaggggttggcaaactactctaaacagagttttcctggagcacagccatgcctattatcttcttattttctacggctgctatcatgctgccgtggcagagttaagtagttgtgacagagaccttatagcccgtagatcctaaaatattgactgtcttgctctttaagaaaaaaattataaggcctggtgcggtggcttatgcctgtaatcccagcactttgggaggctgaggcgggccagaggtcaggagttggaaaccagcctgaccaacatggaccctgtctctactaaaaatacaaaattagccgggtgtggtggcacatgcctgtgatcccagctactcggaaggctgaggcaggagaatcgcttgaacctgggaggcagaggttgctgcgagccgagatcgcaccattgcactccagcctgggcagcaagagtgaaattccgtttcaaaaaaattttttaaaatgttgctccctggcctagaatagtgtctagtttgaagaatgtttcatgtgcaagttaaagagaatgtatatatctgttggtggtggctggaatattctagaaataccagttagatgaagctgtctgataacgtttttcttactactttttaacagctttattcagttataaccatgttctaaataatttacccatttaaagtctacagtccagaggttttagtgttcatagatagctgcaaccatctccattttcggtagtggcaagcatgcggagcaacaggaactctctttcattgctgccaattctgaacgtttttaccacctcaaaaagaaacctgtacccttcgactatcatcctctttctttcccccagccctgacaaccactaatctactttttgtccctttaggttttcctctttggtatttgcaaatggaaggaatcatatgttatgtggacttttgtgcctggcttctttcacttggcataatgttttcaaggttcctccaagttgtagtgtataagattttgtatgcacatgttttcatttctctctatatctagtatacacctaggaataaaattgccatatgtttttattgtaactccatgtttaatcatttattgccagattgttttctcctctattcagatccattgcccattctgttaagactattttttaagagcagtttttaggctcacaggaaaattgaggaaaggatacaaagacagccaagatagcacatatccccacacattgctagtttccccgttatcaacatccctcaccagagtgatagaatttttttttacaattgaggaaccaacattgacacattattgtcacccaaagtctgtagtttatgttagggttcacaattggtgttttacattgcatagatttggacaaatgtgtgacatgtatccaccattatagaatcatacagtaatcactgcccagagctgtcatttttccgctgtctgaatttctacttcttttgtgtggcttttctaagtggctgcagtgagaggttaattcccattgcaggggtggaagtagcagtctgtatgttttaatttcctactaacccataaaatttacattgcttatgctgatttctcagttatggaattgaatattaaatttgtttgtttactaactagaatgaaatatgctgtctagaagcctcatgtgattttgtgatggtgcctcccttccccacttctccattcataaaaacaaaccacgaacctagcttcacgagagagtgtgcttggggacctgtcacttgtgctgtggagcaactttgcattgccctcttgctgcggcttgatgactgtgcacctctgttgggcatgcaagcaaagcagattacagacaagggccaggattttcgaaaaagtaaaactgcatcctgtgaaggaggtggagcaggattatttctctgtgccggtcaagggcatatgttgttcaatgaagaaagcaggaggagaaggagagaagaccttttgaatctgtgtgacaccaatgcaggtggcttcatatcactcagtcctggctttctaccataaaattcagatgataaacatcagcctcatgggagtgttatggaaattagctaaaattatattgattaataaacataaaatgtatgaataaaatacagagactggcatagaacaaatattcaaaaaaatgtgtcctggaaggttttctctagggtaagagccctcaagtcttcttctttttggcagctttttctgtgtttccttctttgtctcaatgaagaggccttctgcaaaattatatatgttttcttgtcattgatctatcctcattctgttccccaatcattattttaactaggtgatatggagattatatttcatttgttaatgtttttgttactgttttttccctctggatgtcattagcatataaagacatctttaaataattattttgggaaacaatgttattttctgccttgtgatgaatcctgggctagacagtttgagacgatgcgatcaattattctaagagataaaacactgtcttctttgggtaacttaactaaagtcatttataacaacctcagtggctgctaagtactatttaatattcttgtaatcagagtctaagcgttttcagttaatttttcattttccttcacatttttatttcctttcacaagtggcattattaattttcttttagcttattaaattaaggtatgctttataaaatttttcaaagaaaaattaatcccatcccctgagataatcagtgtgaatagcttgaatcattcacttccataacttcctttgtgtctatacaaaaatgcacaaatatatttaggctttttttacttagtaacatgtgatgggcattccctctagaacagtagacagtggttagctcatctaaaagctgcctactttccctaacaggttacattatgttttattccaccttccctatattgttgaacattccatttttttctctccttgttatttcccttgctttattgtgcagatatcctaggtactgttaaaacaaaaacaaaaacaaacaaaaaagccaggatggattcctaaagtgggattgcctgtttgcaggcagtatcctagtcacgacttcactagtcttgtgtttgcgcctattttcactcagccttgtcaatacccacttcacttttcttaatttttaagtttttgtgtaaaagaaagtactcaatttttgcttcaaaatttattcccttgataattattttagatttaccatgttttcatatacttactgcttgtgtgaataggctttggcactttttctatttgtatctttttcctttaccactttggggtgctcttcgtgtgttggggacagaaattcttatgggttatatattttgcatatgtaaaagttataatttgacctttttattaacatattgttacatttttacataatctgtcaacttatttattgttgtgttttctgtctcttacccaaatttacacaaatatttaaatatcttttggcactattattatatttagagacttatttattgcaagcagttgaactgattgtgtttataaacatagtcaaaatgtggtaacgtttttgtggattatattttgtgtcactcttgttcccccccaccaaatttatatgattttacagagaatgttagcacaaatctttaaatgattcattccttcttttatcagactgaatactactttctttctatgtctgtattcatgctcttcaacaatattcccaaattttcttctcctaacatagtctgtcctcaagatcctgtccttccttctggtacaactagcacaaatcctttttctcttgtgcctcagggaaacctttataaactatataggttgaccaaattagtggtgattaataaaatcagcaggaaagagtacatttatgcagagaacgttctctaccaaaaacatcgttgttctgtttcgtaaatgcatatatgtgggaggctgtatacttagccattaaagaacagagagtgaactgcctgggtttgagttctggctctaactcttattagccttattatctagggcaaactacttaacttcacttgcaataatttttatttgaactgaatagcttaaactgtgcttactgtgtgccaggcattttccaagtgctttatatatattaactcctaatcctcacaagcactctaaattatcctcattttatacatggagacatgaggttcagaaaaagcttaaataatctgcacaagctagaaagtggggggaggggcagttgtaatcgtaagtgcctaataaatgtttctttcctcattcttcttttctgctcccctcttgccctttctttcctctcctggcttttctctttgtaccattttccaccttctcctatctcctcttcccccacttcactcttttccccctcttcacccttctttccttttctccttgttcctcctacttcctcttctctctctttcgccccccgccccccattttctccctcttcccttcgttctccttctctacctcgtcatcttattatatcattttcagcgtcagtgccctttatcctttggggcgtaccaagatcaatcagagacacatcctgcttcagaggccttaccatctattagtagctaaaagacaaacaacttgcttaaaatgaaatggaaagtaagagattttagtgccattcaagttttaagggaataagtttgtctttcctgggggcaaaacaaaaacaaaacaaaaaaaaacccggctttatggagggacagtttcctttagtggtatcaggaaaggccctgtaaaggcagtagttatattctatctactccattgtatttagaatatttcctaaatttatcagcctccctcttgattattacatgtgatggatcttaagttcactaattgatctcagtactttttggactcttactttatcatgaatgagtgaccagtatggaaagagttaaaatgaaaacgtttaaggagtctgggccatttgtggagagtttgggacacctttcagtactaacaagtcagtgcccatagattgaggatagcaaagaaaagatagatcggtgtgtctaagtcgacagtaggtagaaacatggtcagtggctacacaaatccacatacccacagtcagttgctacgtgtaatcagtccccagagagttctgaaaataatctgcttgtgtaaactgtcatttatatcataacatagctcttctacatctgtgaagtgtcatcctcagtaagttcctcttcagaatgcccaggcaccatggcaacaggcacctcaggaaaagtgagatgggcttttaattgcagcgtcaaaaagtacatttcagcaagtttcaaaaacgagtgcattatatgaccaaaagttataattattttagtcatctcagcatgaataccaggtgtatttttggcatgggccttcttagaagtaagcatcctgattcaatttgaaagcatacatgttacattggagaaaattatattaaaagttaacagaagttaggtatctactacctatataagtttgttttcctgttaatattttccactaaaatgtaagtgaatttgcatgaatgctttctttcattattcacagtgtaagatatagcgagatctaattgtctttaggatgaattgtccctaaggggatagatgctcagttgcctgtgtgtatcagcttttatttttcatttttatttattgacaaaatcaatatgctatttggaaactgccaaattggttctagagatctgacagactaaaatttggagagcaacataaagtcggtcttcccaggatgttgcttgaaccagcagagacccagagtcctaattttaaatggttgctttatttggtgaaatagattggatattggctttacagacaaaatgcccttgacgtcttggatctcagttcttcagaaaggataatgaggatattagaagggtaatttcttttattccttccagccctaatattctgtgattcatctgagtattaatttgcatgcagttatatggagatgggtggaaacattgtaaagaaactttgaaaatgaatgaatttatacaacaagaaaaaataaagagaaaaaaacttaatagtctatttttggtcctaacagggtaaggtataaattatttacctaaataggtataaaatgaaattgaaagtaatagatacagtgtgcagggaagtttccaggaagaaagcttatgggaagatgttgaaaccagatgtgatttgaacacctaagtacttacatttactttccagttctactttttttctgagattagctgtagtcttttgcatatagttggtgttcagggaatatttgtggaatgaattgactaataaaaaaattgttgggcctagctcatccgagctaaggaatttatatggtacagatctttgtggtaactcaaagaagaggtggcccaacacagatcagttagattaggtttgacctcagaaatagtatttccaattgagtcaagaaccttacaaaaataaatgtgctaaaggacagggtttgcatttttttctccaaattttgtctctattaattttattctgaactcacacatcagattttctgagagagatgtgtcataacattagtcccctttgccctagtttgttacccctttgcccaagcagtgagagccaggtccattgtcttctgctggtagttgcacacccataggtgaaggataaggcaacatgtttttgttttttatttttcttattattaagtagaaaatacagctgtgtttctcccctcgtgaaagggtctccatagaaattttctggacgtgaatcctgaaaccctttggtatattaatagaatgtctccaggagccagataaccccccgtgttttatatattattgtgtctggaattggtgggttcttggtctcactgacttcaataatgaagctgcggaccctcgcggtgagtgttacagttcttaaaggtggcacatctggagtttgttccttctgatgtttggatgtgtttggagtttcttccttctgatgggtttgtggtctcgctggcttcaggagtgaggctgcagaccttcgtggtgagtgttacagctcttaaggcggtgcgtctggagttgttcgttcctcccgtcgggagttgctcattcctcccggtgggttcgtggtcttgctggcttccgaagtgaagctgtagatcttcgcggtgagtgttacagctcataaaggcagtgcagacacaaagagtgagcagcagcaagatttattgcaaagagtgaaagaacaaagcttccacagtgtgaaaggggaccctagcaggttgccactgctaactcaggcagcctgcttttattcccttatctggccccacccacatcctgctgattggtccattttacagagagctgattggtctgttttacagagaactgattggtctgttttgacagggtgctgattggtgcgtttacaaaccttgagctagacacagagtgctgattggtgtatttacaatcccttagctagacataaagattctccacgtccccactagattagctagatacagagcactgactggtgcatttacaaaccttgagctagacacagggtgctgattggcatgtttacaaaccttgagctagacacagagtgctgattggtgtgtttacaaaccttgagctagacacagagtgctgattggtgtatttacaatcccttagctagacataaaggttctccaagtccccaccagattagctagatacagagtgctgattagtgcatttacaaaccttgagctagacacagagtgctgattggtgtatttacaatcccttagctagacataaagattctccaggttcccaccagattagctagatacagagtgctgattggtgcatttacaaaccttgagctagacacagagtgctgactggtgtattcacaatcccccagccagacataaaggtgcgccaagtccccactagactcaggagcccagctggcttcacctagtggatcccgcaccggggctgcaagtggagctgcctgccagtcctgtgccatgcgcccacactcctcagcccttgggcagtcgatgggactgagcactgcggaacaggggcggcgctcgttggggaggctcgggccacgcaggtgcccatggcgggtggcggtgggggggctcaggcatgccgggctgcaggtcctgagccctgccctgtggggaggcagctgaggcctggcgataattcaagagcagcgttggcgggccggcactgctgggggacctggcgcaccctccgcagctgctggcctggttgctaagcccctcactacctgaggccagtggcaccagccggccactccaaatgcggggcccgctgagcccacacccacctggaactcgcgctggcccgcaagcaccacgtgcagccccagttcccgcctgtgcctctccctccacacctccccgcaagctgagggagccagctctggcctcggccagcccagagaggggctcccacagtgcagcggcaggctgaagggctcctcaagtgcagccagagtgggcgccaaggccgaggaggtgccgagagcgagcgagggctgccagcatgctgtcacctcttgttatgacatagagttttctccaagttctggggcttcaccttttttgacatgtaatacccagaaatataacaccccagtcttctttagctagggacctagttcatcagataacaatttggccctcttgagaagacctaagaagttttagtattttgaatcaaagcagttaactagataaatgtttgcagttttaattctcatggcatgtgaagggtggaatatttttattacaggaagtgaaagcaaccattcccttctttgtatcatatacatttctgaggctcagcaggctaaggatttctgcatagtactgagaaatccagggatgttttatttctctacaattaggtgttttaagtgggaagaaactctaccagatcatgtaaatgttttatgtaaaaatagcaaatgatggtttatgcataatagatggagtaaggtatgctttctaaactgacttaatatagcagggaaaaaagtaaaggcagtagtaatattattagaagcaaccacatttgtgaatctctctctctatttaataaccttgactcttgtagtatttcagacttatctaaaagattcctgtgtctagaaatatgtcaatagaatatttggaaaatgtctttgaactgactcttgcttgggacagatttcaaagaatcctcatgatcatttgttctattcatatctgttgaaatttatgaatttgtgtgaggatacaataatgtaaaaccttatatatatatacaaggtaatatgcaaagatgatgagtatttctattaggattttttaaaccaataatctttaatttttatcgatttgtttaaaaagaagtattctctgacattgtgactgagttgatgaattggttggatacctgttgtttgcctcagtcattgaaaccaagagcatgtggtataacatcctattctctctaaaaatagtttctgtgtttttggttttgttctgagtacattacttttctctttggtccttataatcacagttttattttttaaattagagatggagtcttgctctgtcacccaggctggagttatgctgtcatggattactatatcctcgaactcctgggctcaagtgatcctcccagtgtagcctcccaagtagctgagactacaggtgtgcactatcatgcccggctaattttttaattgttttgtagagatagggtcttgccatgttgcccaggctggtcttgaactcctggcctccagcagtcctcctgcttcaacctctcagtgttgggattatagttgtaagccactgcacttggccacagttttaaagtttcaaaaataaatagaaataactagttgacttactttacttactgtttctttcagctttttgcctgaattcatcaatggagactttgattctattaggcctgaagtcagagaatactatgctactaaggtaaattataaacatttttttgttcaagatctttctcatatggttgctttttctatgtttccaattgtcatggtgtataggaagagattgataaactcattggttggttactttttatagtttttttattttagcaattgtaacatacattcaaaatggaaacttacactttttcacaaagggtttgccaccagaacacaggtgtcatgaaaactacccctaaaagccaaaatgggaaaggaaaagactcacgtcaacattatcgtcattggacatgtagattcggggaagtccaccactactggccatctgatctacaagtgcgttggcattggcaaaagaaccattgaaaaatttgagaaggaggctgctgagatgggaaaggactcattcaagttgtgcctgggtcttggataaactgaaagctgagcatgaatgtcgtatcaccgttgatatctccttgtggaaatttgagaccagcaagtactatatgactatcattgatgtcgcaggacacagagacttcatcaaaaacatgattacagggacatcacaggctgactgtactgtcctgattgttgctgctggtgttggtgaatttgaagctgttatctcccagaatgggcagacccgagagcatgcccttctggcttacacactgggtgtgaaacaactaattgttggtattaacaaaatggattccactgagccaccctacagccagaagagatacgaggaaatcattaaggaagtcagcacttacattaagaaaattggctacaaccctgacacagtagaatttgtgccaatttctagttggaatggtgacaacatgctggagccaagtgctaacatgccttggttcaagggatggaaagtcaccggtaaggatggcaatgccagtggaaccacgctgtttgaggttctggattgcatcctaccaccaactcgtccaactgacaagccccttcacctgcccctccagggggtctacaaaattggtggtattggtgctgtttctgttggccgagtggagactggcattctcaaacctggtacggtggtcacctttgctccagtcaccgttagaactgaagtaaagtctgtcgaaatgcaccatgaagctttgagtgaagtttttcctggggacactgtgggcttcagtgtcaagaatgtgtctctcaaggatgttcatcaaggcaacattgctggtgacagcaaaaatgactcaccaatggaagcagctggcttcattgctcaggtgattatctagaaccatccaggccaaatcagtgctgcctattcccctgtactggattgccacacggctcacattgcaggcaagtttgctgagctgaaggaaaagatcgatcgctgttctggtaaaaggctaggagatggccctaaattcttgaagtcgagtgatgctaacatcgttgatatggttcctggcaagcccatgtgtgttgagagcttctcagaatatctacctctgggtcgctttgctgttcgtgctatgagacagacagttgccatgagtgtcatcaaagcagtggacaagaaggctgctggagctggcatggtcaccaagtctccccagaaagctcagaaagctaaatgaatattatccctaatacctgccaccccactcttgatcagtgatggaagaacggtctcagaactgtttgtttcaattggccatttacgtttagtagtaaaagactggttaatgataacaatgcattgtaaaattttcagaaggaaaggagaatgttttgtggaccaccttgattttcttttttgcctgtggcagttttaagttactagtttttaaaatcagtactttttaatggaaacaacttgaccaaaaatttgtcacagaattttgagacccattaaaaaagtttaatgaggaaaaaaaaatggaaacttacaaaatgacaagttggaacacaatcttggggaaattttatcaccattatgtaaaaattaatcctttaaacatatatatttcaaaagagcttataatttatatatgctcatttaataatacataattgttgcctatatcctcattaattattatatatttctcgtggatcattttaacttcatttaatgaatgtaccttatttcacttaaccaattcccaattaatgtacatttcgggtgtgcatttttttgctttgtaaactctgctaaaatcatctttgtaaatgaatttttgtaaaaatgcataattgtgtattcataagaatttaggactaacgttagaaaattttctttaacatttagttttcttgaaattattattactacctgaggtcaggagttaaagaccagcccggccaacatggtgaaaccctgtctctactaaaaatacaaaaaattagccgggtgttgtggtgggcgcctgtaatcccagctactcgggaggctgaggcaagagaattgcttgaacctgggaggcggaggttgcagtgagccaaggttgcgccactgcactccagcctgggcaacaagagtgaaactccttctcaaaaaaaaaaaaaagaaagaaaaaaaaagagattattattactgttttgaataaaactatttcctacaacttgagattgataataacctacatcttttgaaaaggtgttaattttctcaatattgggcacatctttcaaagaagagaaggaacctttctcaggaaggagggaagagaaaaaggtaggaaaatgaaaagaaagaagaaaaagaaacatgattctaggtggaaacacaaaggtgttgtgcttataaggtatagcctgtatgatatggaaattctggggctggcagtgaacgcaggtctctgcacatcccatctgcccaccagctgatcagactttccctcagcaaatgaagactgttcccaagtcagtgtttgatattcatgctcaattactttaacattggcatgttcctgttcattccccacagtctcacttctcattaactccatacctcaacctcgttgggatggaaaagccacagccttgcttacaatgcagagttttacaaatgcatagatattaatcatattttcaggagcagaagaaacagcgagagaggcagggacaagcagactcaaaaacaagttgaagatctggtcaggtgtgactcctctcccccttctttaatgctgctggcttgccaaaatcagaagtgccagcctgatcacatctatccaagataagaaaataggggaagccagcctttttatacctataggcagtaaaatgagggtcaaggatagaggaaaaatttgagttaatgcctcttgatgaatttctcttatatttccttcttcactttattttaaccttaaaaactaaattacatttgttgaggtttagtttttaaagtaagatttagctgaatcttctaattcttgaactacatcgttctaggttgatacagtataatccactttcttcatgtatcaacgagtatcaaactcactgctttgaacttttaggctaagttcctagagggcacagatgatgtcttttatatagttaatgtgccctgtagagcacatggtgagtgtttggctatagttttaataaccatgacaattacaacaagttaatgcaacattacacacaattcatataagccattatctccaaattaaacagcctttacactgctctttcacaattgaaaggcggttatcttcattttcaaatacaccccctcccgacctggtctgagtttgcaatgaaggtgaaactggggatctagtaaagtgaagaaatttaaaataccaaaactttgttaaaatcaaaaagtggattgttgatacaaagtgttgagcctggcaactggtgtacagtccttagtttataaagtcctcattttcaggtagctgtaacatcttggtgctttctcttttgcctatttgtcttagttcgtctctgcctggttcactcctattaactcagaatgaggaatatctcttactgattttcctcttgatattttatttttcatttttctgggtcagtcagtgcttctttgattcaaagctaaaaatcacctacttcagtgtatctgttatgcctaccaccatgttaattttctgagaactttagaagaaactgtactatcttatcaaactcctgatattctttcactattgtattctgttgggtcttcaatggatttaggaaagggagttttaaaattgtttccttaatatttagggggttaaggaactaattgcaggatctagctaatgccttaaaaattacagaatatcaagggattgctataaatgtaggtttataggatatgagttaaaatatataagtataataaaaaatatgaaatacagtcaacccttggtatccaaggattcatccaacagtgtatggggaaccttgggacatgcagggcctactaagggacttaagcatcctcagactttgatgttctctagggtcctggagccaatcccctgtagatatgaagggcctactgtaatttaaaatagaagaaattaaacaatattctttatcccaattttttgatgagggaactgaggcccagaaagctaagcgacttcaacaaaatggcagaactagtgagagacagctttaggatcaatgtccatattttctataaaaagaatgttgttagaactgggactgggtcactgctactgcttctcaacaggtaaagcctttggcctatggggtaagacagttgttccttgcgctggatatgtagcatccctgggaatgaatgctaccatcactgtcagtgtgacataacgtcaacgacataatcaaatactttacattgtgtttctggtatgtccctctaaacctttgattttgaggtagcaagggtaaaggtgcaatagttggaccagaccaggaaagagcaaaaccttataaactgataaattgttaaattacctattaacaacagctacttacaagatattggattgagccaagatagaacactgaagaatcagagtgatttggtaatatgaaattagcaagggtataggcaaatttttagtatgtctttccttgtgttaccaatgagtattttgccattccagaaggtgttgctatcaacacaaggccatgttctagatggtatgatgaaaacaaccctagcataagtcaggaataggactgtaggtccaagttctgattttatcttctctgttaatccttcaaagtcttagaagaacatagcatcaagaatattgcaacaaggtgcccaaagactcattgtaactgtgtttatgaagacaagcttggttaagggaaacattgaaccgctgtatatatggtgaatgaggctagcagaaagggtgagtcgatgctgaaccacagattttctattacagagataataagataattccaggtcccctgataattctagcactataaactggaggaatggagaaagaaacataggcagatttttgtctcctgtctttcatcgtatctttttccctcttgggaaagataagggttttttttaaagcaaattgcatgaattattgaagaatatatcttataaaaccaatattttttatagtattttcccattgtcattgaatacttgcatggccatacccaaatttttgaagagtgctctcgatgggcaggggtagtgtatctaatctttaaaaaccaatgctcccttttataaatataaaatgctataaatgttagttgcagtagcagaaaatgtctcatcattttacatttcatcataatggctattacctgtataaatgtgtttcagttacattttagggaattggggatttgggtttaaatataactttctcagttaaaataattggaaattgttacctgtttggcatttgaatagaatgtctgatttttcataaatggactactgatgataagcagaaaatgcctatattttaattccaacttacagatggggacactgattctcaaatagtggggagggcgggttattgggagaagggtacattcaagtgtggatatcaaataactaatacttaatcttggctgttagcagtgtgcattttagatttcaggcttttataagtagtaaagtgattgttttcttgaattaagtgcaaattacatttgtgttgttaatttacatatatgaaagtcttaccaccacacgtgaaactaaatcatggtgttatattcctgactttctcatgtgcttatagtaatgatctaataatggcatacatgtagagttctctggaaatactaaagcactatttaatataagctggtagtgttttattttacttcctaaaattgtttgcttaagacctttttaatattttatttttttctcagtaacattgctttttaaaaatattttcaaacacttcctctttgtaagtgcataatttatgaatgtagatgtaattcataatcagaattgcttaggatatccttttgaatttgataaagcctcaggtttgattctatttacatttcacagaatctccagttaaaaacatctgcattgatccacctaatctcatgaatcttattattttctactcttacctacgtctctttttcagttcttctcagccacatgccaacaacttttagatgaaaaattaattagagaaaatgacaaactggactgttagaaattgtgaacagttagtaagtttgactattataccaaacagaggaaactatacaacatatataaagctcaactccattttttgatatatttctttaaaaaatgtaaacaaaatgaaacaaagcctggagtgtaataaatttttaggcttaagcatgaagtctaattaacatatgctaagatatgaaggctttgctaagggaattatagacaggcagtttcccttgacaactgagtgacaggttcttcactttatattccttagactggctctctaacccttattagcatctcaccaagggaatgatgagactgccaggggaacattaggtgaaactatctcttgactataccttaattcttatgcttgcctcaatcatagtcctttcaaattgactttattgtcatcgatgttttttgaatcttgttttgtttgaatttgtttaacatactgaaggcttttagaaagggcgagactttgccctttacattgaagagctcccagtgagacacacaggacctccaggggcacctgcctgcctctcctcattcatctgatgttacactctgtgttctccagggcctctgtgactctctctttcctccttcgtctgactcatgggattcttccttcgcctaaaccaaccaactatgacaatctaaaaagtaataacaaccaaatatttttagtgcttaaaatatgccagatatttttatatgcactttcatttatgaattcatcccttcacagttccccagctggaggtggtggttagtcccttgtttatactttcttgctgagtttgagataaacaattctatcatcattttattccttttccctgttaacatgtgaacttctggaagttgaagtctgcggtcattcatcctggtatccccagtcattagtaggttcagattgaagtttatatgaagcaggtatctgatccctcttttagaactgaaacagaaaagcactggtcctgctttgcttcatataaaaaagatttctgtgatcaaatgattttgtgaaatttgccacattctgtatgccccttttggaaacccactgtgcatgtatcattttaagtaagtctgccaaaaatctaattttaccttaatatttctcaaatgtatttcaccccggaacatttactctttaccctactaaaaatacaaaaaattggccaggcgtggtgtcacacacctgtgatcccagctaatcaggaggctgaggcatgagaatcgcttggaccctggagacagaggttgcagtgagccgagattgtgtcactgtactccaggctgggagacagagtaagactctttctcaaagaaagaaagttttctatcagtttagaaactatttaccattcaagtttcctgatgtcagccaaaagccagtcttgcaagcaggccattttaaagacagcagtctcaagcctgctatgctaagttttccctgtgccctcttttacccagaagtctggctctggttttaggaagaaagccatcatttaaaaccctgtgctgttctaaaaagacgttcgacttccattaacagaagggatgactttcttgtttgaaacactatagctttcgttcaatgccttgttgaaagaaaaggttattttacaacacataggacaatgaagattatgctagattagaatgtctctttaagtttgggaaagaatggagaattgctacaaggttaaattgcatttcttcttttcctttatacaccatctagataccagaaagaaaatactagattatattaggcaatatacttagagtttttatactgttacttaggtttttaagagttgaatcctgtgacattcttgctgaagaaatcattccttgaaggctgttatttgatgatttaaaaaacaacctttttagcttgaaaagtataaatgtttctagaagcctggtaaataaaaggaacaatctgccacagtacactttatacaatgaagaagaaagtgggaattggttattttgtgattatatctctgcagggaaaaagacgatattcatacctgtatccacaaacagagatcttttagatttcagtttactttatggaactattccccttcttagcaaatctgagaacaagtttgagctaattttagatctgtatctttggttatttggagtatctgtcattttgctctatgcctgctgtgcccttaatctggcaggcagtttttaattacagagttccagtcaattccatttaatgaatgattatggactcttattgttaaagcttgaatatattcaattcttccaagactcttgaaaatatccccccaaaatatttttaagtgtatatcttgcatactgatgagaagaaaggcaatgtcagcaatgaataggggaaaataaagaagctaacatgttaaaacccagtaaaattttatcattgctatttgctaaagaaaatccatatcaatatgccaatatgaaggtataggaaattatacttcatgttttcagagccaactttgaagatggtctttgatttcttcttaccttgtttactttactttattgatagacaactattttgccctctgagcatgtccatttcttttcatactgtccattagccactcagtcctcaactgaaagaaccacttcctatccctgttgcacactccaaaattatctaaactttctctttccttctcctccaatggaaatcatctttcccataatgaaacagatttctgcttgctattaaggagcaagtaaatcaattcaattaattcacagcaagaaatccatgatgaattgtctctcctaaaattacttatattttaaaaggatgaactgttcatccttatatactactaataggaatacatatttttacaaatttcctagaaagcactctggcatcaaatatcaaggaacctgaaaatgctctcataattttcccagtagttttatttccagaattcatttctaagaaaataaccggaaccaaacatttatacacagagatgttgattgtaatggtatgtttaaaagaaaaagaaaaagtcaacttatgtcataaatataataaagataatgataatgtaatgagttgaagaaggaggaaaaagggagagagggatagataagcattcattgcccattttcaggaggctgcgaaaaccatgaaaatttctaagtcttcggatgtagcatggtcatgtggggtcatcatgtctgcctaacagctagtgaatgttcaggtattttaaaactggagaataataactaaataaatgttcctataaattgtaaaggcatttttctgcttagttgtgcccaaataacagaggtttaattaagcagggtactaagcaaagtacaaagcaagacaggttcagatcccacacagtgttcctatcaattgtgtgaccttggacaagttatttaatctctgggaactacagtctgcatattttaaaatgtgataattacacttgccttataaggttattatggggattcagaaatgtaattcatgtaaagtgattcatatctcatatactaaatgtactcaaatgttcttattaatgttactcatttagtgagggagacagttgtcaatagatcacatcctttaaggttggatactttaaaggttatcttatttatcagagtattaggctatattttgttggagaattttagtttattgaaaagaatcttagagtttattagccatatatacattgtatttaattacactgtgtaagggtctatatgcaagtcactggaaataaattttcaaaattgatgtgcatgatacctaggaggaagtagcacttataagttcgtaaccttataaactcagtccataaagttacagtagatgtctcagagccccataacatcttgccaggataatttgcacaagtgttttctgtcctggataaatggatgggtactaaatgatgacttgacctaaaatgaataagctaataggaaacttgggcatgttttcaccagacttacctccttgcctcttgttttatgaagccaagtctctccggatatagtccatgaaataacaattattatgttattacaatttttttcaaaggatctgttttctttcccattaaagaattttagaggagtcagcatagtataacctgataggttttatgtatgtaaaatgtataaactcattaacctatattagttaaattattggcagacagtaaattaagtaattgagaatgacagtctaatggcttttgcattggtgttttgaaattaggttgattattgacactcattgccttgtaataatttctttcagttgtcagtaaattaaaaatagttttgcaaatattgacacaaagttctttggagaatattaatattttgctcactgtagtaaactttgatgtgaggtggtctgcctataacatctgctgtttctaaagattctttccaggttctgaggtgagcatctgatatgtattcatcactatgcatcatctcatttaatcttaacagcaattctggtttttatattagttctattacagatggagctatgaagttcagagggattttttttcaatctaagcctttttccttgtattaaatttcttacaatatacagcatttagttgtatatggacaatatctaattgttggcctagaataagtgttggttggtaaactagtaatacaacttgcaggccaaatatggcttgatagctgtttttgtagttttggcaagctaagaatggtttttacattcttaaaagttgaaaaaaatcaaatgaaaattttataacatgaaaattgtaagcaagttaaatttcagttttattagaacacagccatttccattcatttatttattagctctagagtctttcatgctacacaggtagagttgactagtttggacacaggccctatggcctgcagagttgaaaaaattactatctggccctttataggaaaagtttgctgatcccttgcctagagggataacttatctcatctgctatgcctttataaatgactttatttgttattgagtgcttaccacttgctacataccgtgttgggctcttgtcctgggaatatggtcgtaaacaaaggaatacagtgggtagcttcaaggagcttacagcttaaagcttatgtttcaattaatattttaatagtcatagggtagattgataattttatcatattctatatgataaaattatttggttattctaataaaatatgtaatactcataaggtagactttcatactcatatagacctaataaaatattaggttaatccaatagtaaaattatttggttaaaataaatattcaccataaaccttactgtttgatcctctttctttttaaaaaatgcatacatataccacactgaacataaacctatccctcagatgattgtgattttattgtgattaggaccatatattacaagcatatattttatgtttgctatagctctagatgttggcagtatgggaaattgagctgaaccctgatcattccacggcatgttccgaaaactgtttattgttaattttttgccaagttcctaataccagtttttttccttgtcatttttttttaaaaacaagttaaaacttattcaaacatattctgaatttttcctgtagtactttatactactgcatttgttaacctcgatgtgcatgtatatttcaattttccttactggatgttagttttgttaacattaatgtattttaaactttacttaattgcatatgaaatgctaatttttgttattttaagaatctgcattaattgtgtccaaatagaaaagagttatttaatttcctcaaggcagcattagtatatagtgagtaaaaaacaagtgtttcttctctgtgtgagactcattttctggtttatatgtgtttatatttatgagaaaaataccattattttcatgaggagagaaatggttttaattcaatcatcatttgtctagccactgaacatctattgacttattgatatgtgcccatagtaacctagtgactgagagtgcagacgtcagtttccctgtatgcatggagtgttgtgtttacactttctgcctgaagatcctgttttccacaaataatagacaagatttgccagacgagaatttttgcttgtgtatgcgtgagattgagttgtaccactttaatttgttccatgagtatccctttgtaaaatactacttctgttttagtaagttttttgcctctttctgttcttcagtctcctcaaacctgatgaatgatcatgctgacgattaggattaaattaccttatttgtaactttctgcacctttaatatttgctttcaaattttgtttttggagaccttagggcattcatcattttaatgtgaacttgtgatatttcctttatcattgtgaattatttcagattgttattattgaacttggtattcagcttgttattatatcttttcaattcaatttttattatttttgttattacagccaagtataatggaacatatctttataatgtattatttattaaaactttttggcaggtctctagtttcatacttaagtcaaatgaaagtttaaggaaaatttacatgtggaagaaaatttcttttttatattaccaggttgttcctaaattctgtcttttccatgatgtatgtatgtgtgtgtacatacaagtgtgtatttatatataaaatttgcaattttggtccctattttacttaatttacagttgtttctggctaattttcaattatgccctaggaccttttagataataccaaggataaaacgcttgctaaggtattaattctctgtgttttatggtaaaattatgtatgtcattataaactcttaccttgtgctgaaatggctgaagaaggtagaacactattataatgacaatacttgattagcacaaattcattacccaacctgataatgagtttgctaataccacgccaacatatcatgtctttagggaccatggctttcccaatctgtagatctatacacttttcaatgtttatcttcccttggcctcccaatgtacatagtctttaagtttttggatgttaaattcctagatactgacctggccatggcaggcaagaacctaaatatttaatctacctagtagtaattttcatgtctaaatgcagataaaacattgaaatgggccaagtgtggtggctcatgcctgtaatcccagcactttgggaggctgaggcgggcggatcacgaggtcaagcgatcaaaaccatcctggccaaaatggtgaaaccccatctctactaaaaatacaaaaattagctgggcatggtggcgtgcacctgtagttccagctactcgggaggcgaggcaggagaactgcttgaacccgggaggtggaggttgcagtgagccaagatcgtgccattgcactccagcctgggtgacagagccagactccatctcaaaaaaaattaaataaataaacaaaacattgaaatgaaaaaagaagtcatttgttaggtgtcttctttttcagccctaccatataaatgaatattttcttcatctgtgggaaggctggtggtaagaactgcttatactgcaagcaatgaaaacaaatagctttaaccacacaaaataaaacaattatttattcacataactgaaaaggatagaggagaattcagcttcaatgaggcttgatgggctaccaaaacagcccccaggtactggtttcttgtttcttaactctttgacctgcactgccagcttcattctcaggtgccacattgtggatctctggctctaggctgtcctcttgtgttgtagactggctgccatctcaacatgtctttctactgaagagcagaaatctcttgcagggttgatgcacacaccccagcaattcttgtgctctctttggcccaaattgtggcatgtactcatctccaaacaatttgcagtggataaggggataaattatgtcgatcatctttaccagtcctgatacctccagaactgagtatctaattgtatacttgagagagggtaaataaatattcaaagaaaagtcaggtgctagtatctcataaagaggaggaatgcatgctggggatgtagtatctttttttactacataggagtcccctttttccacaggggatatgttccaagatccctagtgggtgcctggtaccacagatagtactaaactctatatacactgttttcctatgcatacatacttttgataaaatttaatttgtaaattagtaagagattagcagtaataactagtaataaaatagaacattgataagaacagactgaaataaaagttatgtaaatgtgattctctctcaaaatatctgattggattatactcacctgtttttgggcagctgttgattgtgggtaactgaaaccctggagctcaaaaccatggaaaagaggggaccactgtacttgttctggtgaagtgttcatcctaagaacttgaagaaaatggaagaaataaaaaggacgccatcttcatattaccatgacaaattaatctattgcaagtttccattttagctgggactatatgttttgtctgtatgtttttagcattgatgtcagaaaggcttgcagttgggtgtatttgtgaggtgaggtggggtacagatcaattccagtagtctcactttaacatacagaggaatgaaaaatgccaatcaaaggatatgacaagtattcacctgtcacctatttgagtttagcctcaaaatattttattagcattcatctactacaagaatgttaaactaaactgcttgtttaattatttttaattgggaaaagtcttctattgattaatttaggctaccaagagattgaggtgccagtccagctgaaaagcatagactatatctgatacggtttggctgggttcccacccaaaatctcatcttgaattgaacccccataatccttataatctgcacatgtcaacggagaaaccagctggaggtaattgaatcatggcagtggtttccttcatgatggtctcctaatagtgagttctcatgagatctgatgatttaataagcgtgtggcagttcctcctccatttgttttccttcctgccaccctgtgtagaaggtgccttgtttcccctttgccttctgccatgattgtaagtttcctgaacttacagtgctgaagtgtgagtcagttatgcctctttcttttataaattatccaggctcaggcagttctttgtagcagtgtgaaagtggactaatatatttgcagctttataattttaggaaataacaaaatgttccttttgtcattgtcaatagtattttgtcaccaaggtacaatatgtaaaacgtgtactgctattcaaacatatggcatgagacatctgcattatagcaaatattcattcatttattgagtaaatatttactgagtgcttactatgtgctgtttgaggtactcaggataaaacagaaaacaaaactgaggattagccctgcctcctggtataaagagacaataaataatatgtaatgtgttagaaagtgttatttcctttggagaaaacagaaaattctgagtagggtaagggcagtcgggacagtcaagatcaagcttgctagggttgggcagagggaagtgcgtgaagtcaaagttttaagtagggtaatcagggtgtgcctcattaagaggtgaaattttaacaaagattagatgaaggaaagaagttatgaagaccttttatatctacatcttatttaagttcaacagctactttttgatatgaattgtatcctctccatatttcactgaagaatcataagaggctggggcagtataaaattagggagagttggaaattttctggttcgtgcagatttggtaaacaatcgaattgtagaaaatgacagctctttgtgtgtggttgatacatataagtgaaatcttcagtttatgttgaggatatatggcatatttgagtgtgctcctggcagtttgagggttctgaatttctaggagaggggagtagagttcgaggtggaagctgttttgacagtatttgcacagcaagcacatacagtatgtacatagcaacatacacgtagtgtactttttcttgtgtggtggtggtggtggtggtcagagagactaggagtggagaagccccagccacctcttgccgttgttccttctttgagagatgattctatttaatcagcaattaatgtgttcttcctatacctttcattcctaattatttttgcctttaatttttatatttttcatttattagctcattgatttaacagatgttagataactaatatttgtctttagtgattatcatcattgaagtcataatattttacatttatttaatacctttatatctcatagcatatagatttgcatatatgtgtatatataaaattttatgtgaatgatctagtgtagaaccttcaggaaatatttataattattattgccatttttctaagtaagttattatttctcatgagttccaatccatctcatactataggtttcacagcatgatttatctattttctgaatcttcattacttacaggataccatgtaagaaaatagtgtttctttccctgcctctgtatatgattatttctcatatacatgtagcagctttgagaataacagctttgttgatgaaactagaaccaatggtatttgaattgtttaaaaactgcaggaaaatcattgtaagttctttgtcattttgacataaatcatcttgaagaattattttcttgtaaaaatcacactctaatatttgaaaacatttataatatttaatgctttatggcattttcttaataaaatatcttgcttttgcagactgttattttttgatatatgttcatttagtttggttttggtcgagaatatgccttgtcttgtactgatattcagatacccactgctaatgttttggttaaggactctgttcccacctgtcctagtcagtgttgggctgagatgtggatgcagctgggcaacacatgtttattacctctgtgagtgtctactgaagctgagagggatattttatatgttactgggtataaatctggatcctaaatatctcaggatcaatggaatggagataagaaaatgaaacacagttttctaatttaaatgaaatgtatgaccttttctatacaatcttaagaaggtactactaagaccagttacaagacagtacagggagatatacttgatacaataattttatggaattttaatagaattattgagatatgcaatgggctagttagaaatttcctgtcactgtaaatttgtaccagcttagtgtgagggataaagaaaggactcaatttgatcatataccaaatgtttaatgtatgcttactgtgtattattcattgttctaggtactggggatatcaaagtaaatcaacactgaccccactccttagtaataagcacgaaatgactttaaaaatagtatgaaattatattagtccattctcatgctgatatgaaggaatacctgagactgggtataaaggaaagaggtttaattgactcacagttccacattgctggggaggactcaggaaacttacaatcatggcagaaggccaagaagaagcaagcaccttctaaacagggtggtatgatggagtgagagcaaacaggggaaatgcaagacgcttataaaaccatcatatcttatcagatttattcactatcacaagaacagcatgggggagactgccaccatgattcaattacttcccaccaggaccttcccacgacttgtggggattatggggtttacaattcaagatgtggtttaggtggtgacacaaccaaaccatatcatgctggccctggctcctcccatatctcatgtcctcacatttcaaaacacaatcattccttcccaagagtccccccaaagtcttaactcattcccacatgaactcaaaagtccaagtccaaatctgagataaggcaagtcccttctgcttatgaacatgtaaaatcaaaagcaagttagttacttactagtgagtaaatatacacattccaaatgggagaaattggccaaaaaacaatggggctacaggccctatgcaagtctaaaatccaataaggcagtcattaaaccttaaagttccaaaatgatctactttgaccccatgtctcatgtccaggtcatgctgatgcaagaggtcagttctcacagccttgggcagctccacccctgtggctttgcagggtacagactagcctcactcttggctgctttcacaggctggcattgagtgcttgcagcttttccaggtggaagtgcaagctgttgctgggtctaccattctggggtatagagaatggtggccctcctctcacagctctactaggcagtgccccagtcagaactctgtgtgtgggctctgactccacatttcccctctgcactgccctagcagaggttctccatgagggctctgcccctgtagcaaacttctgcctggacattcaggcatttctgtacatcttctgaaatcttggttagaggttcccaaacctcacttcttgatttctgtgcactttcacgcccaacaccattagtaagctgccaaggcttggggcttggaccctctgaggcaatggcccgagctttatcatgtccccttttagccacagctgggactgaagcagctaggatacaggcacgatatcccgaggctgcacagagcaggggaaccctgggcgcagcacatgaaacaatttttttcctcctaggccactgggcctgtgttgggaggggctgctgtgaaggtctctgacattccctggagatattttcctcattgtctttggattaacattccattctttgttacttatgcaaatttctgcagcgacttgaatttctcctccagaaaatgtgtttctcttttctatcgcatcatcaggctgtgaattttccaaatttttatgctctgcttactcttcaatgctttaatgcttagaagtttcttctgccagatatcctaagtcatctctctcaagttcaaagttccacgtatttctgtgacaggggcaaaatgccgccagtctctttgctaaagcatagcaagagtcacctttgctccagttcccaagaagttcctcatctccatctgagaccacctcagcctggactacattgttcatatcactatcagcattttggtcaaagccattcaacaagtctttaggaagttctaaacttccccacatcttcctgtcttcttaaccctccaagtctctaggaagttctaaactttcacacacttccctgtcttctgcgtcctccaaatggttccaacctctgtctgttacccagttccaaagttgcttcttcattttcaggcatatttacagcagcacccttctcctggtacttactgtattattgttctcacactgctatgaagaaataccaaagtctgggtaatttataaaagaaagagctttaattgattcacagttttgtgttgctggggaggcctcaggaaacttagaatcgtagcagatggcaaaggataaacaggaactttcttcatagggaggcgagatggagtaagtgcaagcaggggaaatgtcagatgcttataaaaccatcagatctcatgagactcactcagtatcatgagtcaacagaatggaggaaactgctcccaagattcaataacttcccacctggtccctcccacaatacttggggattatgggaactacaattcaagatgaggacacagccaagccatatcagaaatgtttaagatatgtacaagtataaaaaataataaaccaaatacttttgtaaccacaacccaacttaataaatgctacctatacagttcaagacttctgtggccctttcttatggttaaatctaaaaatttttattctcttacatttgttaatactttaacaaaagcaacactaaatcctatgtaaaggtaataagcatgtttttacattgtgtgtatatatgcagttatactgcctgtgtgattctgtaactcatgaatgtatcatacatttattcttctattatttttgttgttgttcattcatttttgtcatagaataacccagtgtttaaatacgccacaagtttttttgttaatgtaaggtacgacaagtgtatatcagtgatttttatttgggcttatctgattactggtgaaaatcaacatcctttcatgtgtattggctttttctgttttgctagtctttaacttgcctattaaaatattttgtgtatttgctttcatggctcactgcagcctcgacctcctgggcccaagcaattctcccacctcagccttccaaagtgtgcaccaccatgtttggctaattttttttgtagtgatgggcttttgctgtgttaccgaggcttgtctccattttctgcgctcaagcaatcctacaggtctatttgctttttcatgtgtattggtgatatggtttgactgtgtccccaccaaaatctcatttggaattctcacgggttgtgggagggacctggtgggaggtaattaaatcatggggggcaggtctttcttgtgctgttctcgtggtagtgaataagtctcatgaaatctgatggttttaaaaaggggagttttcctgaacaagctctctttgcctgctgccatccacgtaggatgtggcttggtcctcctttccttctgccatgattatgaagcctccccagccacgtggaactgtaactcccattaaacctatttcttttgtaaattgcccagtcttgggtatggctttatcagcagcatgaaaatagattaatacaattggctttttcaggtttgctgttctttaacttgcctattaaaatattttgcctgtttttccatccagttattcattctttatagatttttacaaattctttatgtattctggatagtaaccttttgtttttagttatattcgtggaaaataccttctttcattttgaagctttctttttttactttatgcatattgtttattgatgaaagaagggtcttagttaaaagtagctgaatttatcagttctttctcttcagatttatatttattttcgcaccttgtttaaaatactacctactgcaatcattttcttttctgttgttttttgtaaatgtttggagactttgctagtacgttttcaaatatgcatctgtatatatttctgtcttcccaattctgttcaggtatctatttaccaaccatatggcacaaagaacactttctttgtgccagtcactgttctagttcctagaagacagctgtgaatcacacaagcaaatacctgtgcttccgtggtgctgatattctactgtttcattttgccagtaccctgttgtgttaattactttgtatatctgaatatcccgaaaggcaagttcaactaccgtgtccttttgcaaaattgcgtttgcttttttttggtcccttattctttcatgtaaatcataatcgtttgtttgagttccacgaaaaatatcattgactcaatagataacttttcttatctttctgtccctctgagtctttgatactctttccatgtatatgtgaaaaattatattttaagactaattagccaggtgtggtggctcacatctataatcccagcactgtggggggccaaggctgtaggattgcttgagcccagggatttgagaccagcctgggtaacatggcaaaaccccatcacaaattagctgagcatggtggtgcacgcctgtagtcccagctacttgggaggctgagatgggaggattgcttgagtccagaaggtgaaggctgcagcgagctgtgattgtgccattgcactccatcctgtaggacagagggagaccctgtctcaaaaagaaaaaaccaaaaaagcaaaagtataatctgaaaaatggagccacttgttggttcataacatcatacattgtatcctaaaaacaatatattttatgtaactgagaaaaaaaatcaaagatagaagtagttgaaacaaaaattcccactcactggcatcataagtctatgttttgtacctttctattaggaaactaacattacaaacaacttattagaaagtcatatactttcttactttgctaaatttcatggctttaatatcttctcagtccttagtgaatatgagggttgtctttttttttaagaaaatatcatatcagtggaatttttcacagcacctcagtgcttctgatgctaggaaattgggctttattctatataaaaataatcataaatattaatatatagtaggtgagtattgcttgataccttatagtatttctacattattccttgtttgcagggtcttagtagtttctcatctttacctttctgtttctcctctcttagatcttagtatgttaccctaagacccagaaaacagtgaacacatccttagttggccacaggcctgttattgcactttggttaagattttgtttctcgggtctcctttctaactgtcggacgctgccctgttattagagctatttccacttctagtgagttcattctcagtctgtaatgagattagaaccatttcaccttgtgaatggctgctgtttggcagttaaacaccttcaacgagtttaatagacgttcttggtttagattcagtctgattttctcagtgctaataatctctctccgtgtcctgagccaagcatttctatgtgtttattgtaaatgatgaggtaaagtaagatattccggccttgctcatatgtttcaagtagcttttctttttatagtatcctttttgtgaaactaactctagagatgtcatctgacatttttcaatcagctatctcagaacttttgttttactttgtgagagtaaagaaataggatttctactcatggcttttctgctaattactacctagctgtccagttgtcagccagtcaatttttatctcttgtttttattttcttaatctacaaaatgttgcgatagtactagatagattacttcctgggttttgtttaactgtctttttcccaatggctttctatatggattctgtgaaggtagatagtgatctattaatcgtccattatgttgtagtttctatttgccatttaaattttatttcctttttggtgagtatgtctatttttaacatttaaaagaggaagacaactttcgttgtcatttatggtatatttagcaataagatactgcacgattgtaccccctagccagtgtacatttttataagtgtatttgtaaaaatccattttcttcctcaagaatattatttaaacatttattgaacatttactatgcaacaaactggtgcctggcactggaaacaataatgaatgaacctgcccttgaggaactttcagtgtaatgatttttggtttggtggcagtctgttctgttcaaccatgctaatattcctgtatgccctgccatatgcttctatcttcctttttaggagtgttaacctgagaagggtcacttctttatgtccttgcttggtgattatagtaaatgtcaatgttcttttagggtcgagaaagtatatgtcgatgatcttgtaaagatgacatatacatcttttagagcataatgtatttctgaatgatgagaagttaattttttcattggtcactatattgtaggacagtcataaatgaatgaagcacaggttgagcttgacacaattaaagagaccttgaagtaaaagaagaacctttaaatctaccgagaatggttcttagaataatttaagaggcagtatgggtgttttgtatccttgaaaactctttgaatggcaactttatatactagattatatttaactttcccttactcagctgtttgtcagagtccaagaattgttttattcctgaattaagaagtctgaagtcccatcgtgctcacttttatgtacctttgcctctgtatgacattggaggaaaaggtgtcatttcaaaaatacggtctctttagccatccaagttcactagtgccaacaaactggcacttttgtggcttcatacttataaatatattgcagtgtttttcactgggtaagttatcttgtagagaaggcaaagaacttataaattcatttcatgatgtccaaaagataatccaggagacatatttacacaggcatagctccttgttctgtgtctcacaagggagaaagaggcttttatcaaataatattataggacagctgtcttggttttacttaaaatgtaaacttttattattacttcaatattcagattagttttttcattcatgtaaacttgtcatttctgcttaaagaacttcaaagtttcatcaaaatagtttcatttcaatttcaggtagttgagaatataatttattatacatgtatcaaagtccttatgttaatcgtgaatgtcatcacataagtattttttaaagacccattaatgtagtataatctatactttcttaaataaaacgattgtcataatcagtccattattgtaacactctaataccattcctgaaatgtcccatgatgtgaaataaaaaagataatgataatgattctaatgatacaggaatagtaaaggcataataggatatgtctattgataccttatctttacttttgtaactcttgatcttgttcataaaggtgaatttactacttattcttaccttttcttttactttaatacatagggatgtgagctcatttcaactcctgatcaagaccacactgactttactaagtgccttaaaatgctccaaaagaagatagaagaaaaagacttaaaggtaatatatacatgtatttggtggttattccaaggatgtgaaaacaatttgtgtttattttttcactcagctgaaatggatatttacttttgtgctttttctttttttttaaattgctgtcaggttttttttcccctgtagagcagataagtctgcacttagctgccaaaacattaacatgtgcacttaaaccagggaacacaaatgtaaacatcttacagtggcatggtaataaaatgggtgaactggaccgtgtgtcaagtaatcaaaactgggaactcattcttgcctgaaagcgactagctactattcgtctctagttgattgttgccatgaagagctatatgtatttttggactgtgtctatttacatattatataggcaaaacaaatatggccttgatttggcccctgggctatcattgcaaatttttatttaaacgaatatcagctttttttaagccagagaagagtctactgctttgcattctgtgctctttaaggtattcagtactgattttcacctagcatccaaatgtttaattgcattaattagtacaccagtttatactttattgtttgatacctgttgaaatggtatgcaaagtttcttaagactgtgtttaatgaacagctacaaaattaaacctgaagcaatgaatgacaattgacctttttttcccccactagcaggggcaataagttttaagctgagatgaatgatcagttgtgtaattttaaaccaagaaaagtaggaaaacacccttgtatattagaacgattttgatagtacaagtaacagaaaacacatgtcaacctgctctcaataaccaagtgatgtagggcagtcttgagacagagcttaatcagaactcatgccctttttcttttatttatcttggcttcactttgtaggttttgtcttcacactagcttccttgattgtctccaactgccacctgcagtaacattttacccttcacatgtagggggattaagacatagagctggtgagatacatcacttcccaccatcattggacttaacccttaagatctctccattaaaccactcttgcttttggcaaaggagaacgagagaatcctgattgtcttgggctggagccaggtgtgggatcaatccacgtggcttatatattcaaactacgtggctaaaacatatttggcaggatgggatagatatcagagtggcagctctaacaaaaatttactctctagcaaaagtttgttaaagatacactgtagcatatatttactaagttgcagttagtagtaaattcttttctccctttgaaataaaaccttgctaactatcacaattggcaagtagctcaatctgcgaactcaaacaaaaataattgagtgaacatttctcatctctgatgtagctttgctgatctatatcaaatgtattgtgatatttccagcagtaaattgatataattaagtatttgtttaatgaaagcaggaaacagcaaattgagagttacttatttcatccagatatcagtgatttggtgtttctttggaaaaacagtgtaaatattcacagctgtcttttgtttttcccatcacctccactgacatgattaaaagctaagacgcaattatgtgagtctaatgagttgtgtctaatcgatagtatcagtaatacagtattctgtcgttgaggcttgaaacaaatcatcatatcttaaactcaacaaggcccagatctagagagagccccaaactgagagaggagggtatgatctgcaaacaaatctgacagtcttggccaatctggtggggactctggaagcaagagtagctgttagagggcccctgcactgggcagaaatagcaacaaccttgtactccaactgtgcttagtcacagactagagggtgctcatgaggagggtggacttggcttagaggttgccaaggaagagtacagacttggtggctgtgatgtgctgcctcctgaaggggttgcagcgggggctgatgacggatgactggcctccacacagcctaacagtgagttcttttttgaagagcaatgcagtggtacactgcctgtgctgcctcaggccccaacatgctttggacccaatgcattctccagccccatcctacaccagtgtttctccttgttcttaaactatgccgcattttctcctccctcctactttaatgtgtttttatatatgttgccccctctgcttggaatcttatttttccttttctttgtctagaccatgcatgctagagggcttctttttctttttttttttttttcaggtctgatacatttatttatttttatatattttttatttcaatgggttttggggtacatgtggtttttggttacatggatgaattgtacattattgaagtccgagagttgagtgcacctgttaccccagtgtagtgtacattgtacccaataggtagtttttcatccctcaaccccctcccaccctctcctcttctgagtcttctgtgtccattgtatcactatgcctttgcacactcttaggttagctcccacttataagtgagaaaatgcagtatttggttttccatttctgagttacttcacttagaatagtgggcatggcagagtttgactggctgtccttaactatcactctaggttaggtttagttactctacatttccataccctcctttattttttctttagggtattctgaacaattttgatcattttactaattgtttctaattgtttgcctaaagtcattcttgccagcttgactgtacagcccatgaagctgagctcaggtttgcttgttcataacttgacagcagtattttgcataaaagaagtattccttgaaagtttggtacgttttatgcaccacaagaacacacaggagagtggaacataacacagttaggagaaggctttttagagaaggctgagacatagtaagcaaataggaggtagacagtgcattagtccattttgcattgctataaaggaatacctgaggctgggtaatttataaaggtaagagttgtatttggtgtatgcctatgctggctgtacgagcatggcatcagaatctatttggcttctcatgacccctcaggaagcttttactcatggcaaaaggtgaaggggcagcaggcctgtcacatggcaagaagggagcgagaaagatgacaggctcttcgtaagaaccagttctcttggcccagcatggtggctcacacctataatcccagcactttgggaggttgtggtgggcagatcacgaggtcaggagatcgagaccatcctggctaacatggtgaaaccccatctctactaaaaataaaaaaattagctggggtgatggcacacacctgtagtcccagctacttgggaggctgaggagggagaatcacttgaacccaggaggcagagtgccgggtccaacccgcagaccctgacccagcaacagatgaaagacatacactgacacaggtattttgcctgtcagtgggactaaggggctctgacgcctgagtctgcagctttcgcctccataaaatggcaaagtttgcgtttatttagtacaaattaaatgacaaagttctcaagtaaacaccactagagggtaatttacattgttgatctcctgagtagagagcagtcatgagcccacagatgatcaaaggttggtcttaggaccacatgagtaaaaaagctatttagataaactcctttacattcctatgtatctttgccctaagcttttaagagaattcagttgccttcagccaaatccttcactgaagctatgcaaacccactggccttccaagaaggtttgtgtctgtttcctataactttataatctcccaccaccctgaccgatatcctatagcggaggttgcagtgagctgagatcgcaccactgccctccagcctgggcaacagagcaagactccacctcagaaaaaaaaaaaaaaaaaagaaccagttctcttgtgaactaatagagtgagaacttactcattagcacaaaggtggcactaagctattcatgagggatccacccccatgtcccaaacacctcccaccaggctccactgcagaaattggggatcacatttcaacatgagatttggaggggacaaacatccagactatatcagacagcaaaggggagaagagtgtttcaggaagtactgtagtgcacacagagtgtgtatagcactttgtaggagtgggcacaactcctatctccatcctcgtagggtcctgactgggccttgagaattaaattgacctgagatagattaacaagaacaaagcataaaattttatttcatacaaattttacatggcatgggagcccacataaagaagtgaagacccagagaagtacttaaagcctgttgctttatatactacattggacaaagaatagtacattgtgaagaagcatctaacttacttgcagaggcttgaaagataagagttattttattgtattttttatttttgttttttttttatactttaagttctagggtacatgtgcacaatgtgcaggtttgttacatatgtatagttgtgccatgttggtgcactgcacccattaactcgtcatttacattaggtatatctcctaatgctatccctccccactacccccaccccacgacaggccccggtgtgtggtgttccccaccctgtgtccaagtgttctcattgttcaattcccacctatgagtaagaacatgcggtgtttggttttctgtccttgggatagtttgctcagaatgatggtttccagctttatccatgtccctacaaaggacatgaactcatccttttctatggctgcatagtattccatggtgtatatgtgctacattttcttaatctagtctatcactgatggacatttgggttggttccaagtctttgctattgtgaatagtgccgcaataaacatacgtgtgcatgtgtcttgatagcagcatgatttataatcctttatactcagtaatgggatgactgggtcaaatggtatttctagttctagattcttgaggaatcgccacactgtcttccacactggttgaactagtttacagtcccaccagcagtgtaaaagtgttcctatttctccacatcctctccagtacctgttgtttcctcactttttaatgattgccattctaactggtgtgagatggtctctcattgtggtcttgatttgcatttctctgatggccagtgatgatgagcattttttcatctgtctgttagctgcataaatgtcttcttatgagaagtgtctgttcatatcctttgcccacttgttgatgggttgtttgatttttttcttgtaaatttgtttaagttctttgtagattctggatattagccctttgtcagatgggtagattgcaaaaattttctgccattccgtaggttgcctgtttgctctgatggtagtttcttttgctgtgcagaagctctttagtttaattagatcccatttgtcaattttggcttttgttgccattgcttttggtgttttagacatgaagtccttgcccatgcctatgtcctgaatggcaatgcctaggttttcttctagggtttttatggttttaggtctgacatttaagtctttaatccatctcgaattaatttttgtataagatgtaagtaagggatccagtttcagctttctacatatggctagccagttttcctagcagcatttattaaatagggaatcctttacctattgcttgtttttgtcaggtttatcaaagatcagatggttgtagatgtgtggtattatttctgagggctctgttctgttccattggtctatatctccgttttggtaccagtaccatgctgttttgattattgtagccttgtagtgtagtttgaagtcagatagcatgatgcctccagctttgttcttttggcttaggattgtcttggcaatgcaggctcttttttggttccatatgaactttaaagtagttttttccaattctgtgaagaaagtcattggtagcttgatggggatggcattgaatctacaaattaccttggacagtatggccattttcacgatattgattcttcctatccatgagcatggaatgttgttccatttctttttgtcctcttttatttcattgagcagtggtttgtagttctccttgaagaggtccttcacatcccttgtaagttggattcctaggtattttattttctttgaagcaattatgaatgggagttcacacatgatttggctctctgtttgtctgttattggtgtataggaatgcttgtgatttttgcacattgattttgtatcctgagactttgctgaggttgcttatcagcttaaggagattttgggctgagatgatggggttttctaaatatacaatcatgtcatctgcaaacagggacaatttgacttcctcttttcctaattgaataccttttatttctttctcctgcctaattgccctggccagaacttccatcactatgttgaataggagtggtgagagaaggcatccatgtcttgggccagttttcaaagggaatgcttccagtgtttgcccattcagtatgatattggctgtgggtttgtcataaatagctcttattattttgagatatgtcccatcaatacctaatttattgagagtttttagcatgaagcgctgttgaattttgtcaaaggccttttctgcatctattgagataatcatgtggtttttgtctttggttctgtttatatgatggcttatgtttattgatttgcatatgttgaagcagccttgcatcccagggatgaagccaacttgatcatggtggataagctttttgatgtgctgctggattcagtttgccaatgttttattgaggatttttgcatcgatgttcatcagggagattggtctaaaattatctttttttttgttgtgtctctgccaggctttggtatcaggatgatgctggcctcataaaatgagttagggaggattccctctttttctgttgattggaatagtttcagaaggaacggtactagctcctctttgtacctctggtagaaattggctgtgaatacatctggtcctggactttttttggttggtaggctcttaattattgcctcaatttcagagcctgttattggtctattcagggattcaacttcttcctagtttagtcttgggagtgtctatgtgtccaggaatttatccatttcttctagattttctagtttatttgcgtagaggtgtttatagtattctctgatggcagtttgtatctctgtgggatcggtggtgatatcccctttatcattttttattgcgtctatttgattcttctgtcttttcttctttattagtcttgctagcggtctatcaattttgtcgatcttttcaaaaaaccagctcctgcattcatgattttttgaagggtttttttgtgtctctatttccttcagttctgctctgatcttagttatttcttgccttctgctagcttttgaatgtgtttactcttgcttctctagatcttttaattgtgatgttagggtgtcaattttagatctttcttgctttctctgaagcttgtgcatgcatcgtgtagttctcgtgccatggttttcagctccatcaggtcatttaaggtcttctctacgctgtttattctagttagccattcgtcccatcttttttcaaggtttttagcttctttgcgatgggttcgaacatcctcctttagctcagagaagtttattattaccgatcttctaaagccttcttctcttaactcgtcaaagtcattctccatccagctttgttctgttgctggcgaggagctgcattcctttggaggagaagaggcgctctgatttttagaattttcagcttttctgttctggttcctctccatctttgtggttttatctacctttggtctttgatgatggtgacgtacagatggggttttgatgtggctgtcctttctgtttgttagttttccttctaacagtccgtaccctcagctgcaggtctgttggagtttgctggaggcccactccagaccctgtttgcctaggtaccaccagcaaaggctgcagagccacaaatattacagaacggcaaatgttgctgcctgatcattcttctggaagcttcgtctcaggggcactgagccatatgaggtgtcagtcgacccctaccgggaggtgcctcctagttaggcgactggggggtcaggaacccacttgaggaggcagtctgtctgttctcagatctcaaactccatcctgggagaaccactactctcttcaaagctgtcagacaggaatgtttaagtctggagaagtttctgctgccttttgttcagctatgccctgcccccagaggtggagtttacacaggcaggcaggcctccttgagctgtggtgggctccacccagttggagcttccgggccgctttgtttacctactcaagcctcagcaatggcgggtgccctccccggacccccacccagcctcgctgccaccttccagttcaatctcagactgctgtgggcataggaccctctgagccaggcatggtatgtaatctcctggtgtgccgtttgctaagaccattggaaaagcgcagtattagggtgggagtgactgattttccaggtgccgtctatcacggcttcccttggctaggaaatgtaattccccgacctcttgcacttcccgggtgaggtgatgcatcgccctgctttggctcatagtccgtggactgcacccattgtcctgcacccactgtccaacaagccccagtgagatgaacccagtacctccgttggaaatgcagaaatcacccgtcttctgcatcgctcaggctgggagctgtagactggagctgttcctattcggccatcttggtacctccccgaaagataagagttattttataacaagacaaggatgccctctctcagcgctcctattcaacatagtattggaagttgtaggcaggcctgtcgggcaagagaaagaaataaaggctattcaactaggaagagaggaagtccaactatctttgtttgcagatgacctgatcctatatctagaaaaccccattgtctcagcctaaaagcttcttaagctgataagcagcttcggcaaagtctcaggatacaaaatcaatgtgcaaaaatcagtagcattcctatacaccaacaacaggcaagctgagagcaaaccatgaatgaactccccactcataattgccacaaaaagaataaaatacctaggaatacagctaatgaggaaagtgaaggacttcttcaaggagaactacaaaccacggctctaagaaatcagagatgacccaaacaaatggaaaaacattccatgctcatggacaggaagaatcaatatcatgaaaatggctatactgcccaaagtaattaatagattcaatgctgttcccattgaataattgaataataaaactaccaacacattcttcacagaagtagaaaaaaactaatttaaaattaatatggaaccaaaaaaacagcccaaataaccaaggcaatcctaagcaaaaacaacagagcttggaggtatcacgctacccgacttcaaactataccacagggctgcagtacaagaaaagacagatagaccaatggagcagaacagagaacccagaaataagaccacacacctataaccatctgatttttgacaaacctgacaaaaacaagcaatgggggaaagattccctgtttagtaaatggtgctgggagaactggctagtcatatacagaaaacagaaactggaccacttccttacaccatatacaaaagtcaactcgagatagatgaaagacttaaatgtaacacccaaaactctcaaaactctagaagaaaacctaggcaatgccattcaggaaataggcacgggcaaagatttcatgatgaagacaccaaaagcaattggaacaaaagcaaaaattgacaaatggtatgtaattaaactaaagagcttctgcacagcaatagaaactataaacagtaaacagacaacctacagaatgggagaaaatttttgcaatctgtgcatctgataaaggtctaatattcagcatctataaggaatttaaacagatttacatgagaaaaacaaccccattaaaaagtgggcagagtgattatattaaatctgaggaagtggagtatctgtgagcttccacctgactttacatttaacttggaaggtcaacactgtattttatttgatgttatagcaagagaaaagcaacattagaagggaaaataatacaagatttccctccacccatactcctgtctccatatgagatcatgaagcctttttaaaatttctcctgataatacacataaactgtatcaaatctttatatgcctcttctccatctaataaatcatatcaaattattatatattttttatttctacttattaaattataaatatgaatttataatcaaagtatattttataataggcctcttactataaaatgttaattgtaatgtaaataaaatgcaaaatagtatttaatatattaaagaactatatgttagaaattcatagaatttgaattaggtctgtcctgatcctaaaggagtttactatctagaacatgagattactttttttaaattcccctaaattacctttttagttcatgtatccatctaattgaaacccaatcacccttaacatttactcttccacaaaaggattctctcatacctgggactttttaaggctttgctttcatgttgccacattgtttatctgtaactgagtcatgaatactacattatcaggatgccatctgatatgtctgagtcttcaaaggacacatatattttcggatgctgtgatacacacttgagatctaaaccctgggatttggtggaaaacattaaaagctgtctctctaaacatctaaacatataagatgcatgttctttacaataaagcagaaataaattaagattatgaggccctaagaataacaggataggtctctttaggatatttactagtattatatggcaacagaatcagttacttcaattttaaacatagactatatattagacaaaatctgagcagaaaagtttccattaatttcaatctgaatgctttagagatttaaaccaatactagttttatttgctaaaacctcagtacattttagccagcttatattatgccatgtaatttcttaagcagtttttaaatcaaataatgaaggatggtgagtaggttatatgaatgagggcaaatgcttatattatatatatatgtgtgtgtgtatatatatatatacatacagctacacacacacataaatgactgaattaaataatactgaaggccataggtttattacatattattcttttttattttcttaataggctgggcaagtactgaattgtgatttacatattttaagacatttctgtataatttgagtatgtccaaattgaagttattaactcttgaccattaggactctgttaagaacagtctttctatttaatgtctacatggcatttctcagatagatacattatctttatacagcagcaaattctatgagcttagaatattttgttttatcttctaattatcagtattggatttaggtgtacattacttttctgcaatggactggtggatttgttttattttcatactaaatatgaacattctcctccattgaaaatacaatttaaggctaactgtctgattggactaattactcagcagcataaaaagatgtgactcattgggttgcaggaaaaaccatgatagtaccccaagagatatctttccaggtactctggtgtctcagtacagcctgctttcatgaactggtatctttggcatgatctaaaggaaaatatatgtgtgtgtatgtgtaaaaatgtattctgaaaaggaaaaaatctttatagtggagaatcctggcagataccacattaatcaagtgaaaaacattaataacatcgttatatcatactagtaatgccctcctacatggatataagttgagaagggcacttgtggagttcttctctaaaatccacaattccactttaacctttaaagtagtcaaagaactccaagttgaagaatattccatcaaatgcctgaccaacatttttaaggccaacagagaaagactgagaaattgttatggccagaggagatgaagaagacatgacaactaactgcagtatggtaacctgatttctgttgtgtagtggaaaaataggacattagggaaagctgttgaaatctgaataagcttgaaagtttagttaatagtagtgaccaatgtcagtcttagttgtatcctatgtactgtgtttagacaagatgttaacactgctgaaaactggatgaagagtatactccttgtactatttttggaactttttagtaaatctaaaattattccaaaacacaacatttcattgagaaaatatattcactgtttcaaatatgctattaccctagaacaggtgtaatcttttagtgaatggctcacagtaatatagaataaaggcaagtgcttcttagtacttaggcaaaaaaacaaaaaacaaaaaacaaaaaaaaaacaatgccttttgtggactctcccacctttaaaatatttcctcaggaaattttaaattgtgagtttctgatgcatatttagacaactgttttacatgaaaattatgcctggtagaaaatcttaggtagacatttgatggtctttaaactatggagacagcccagatgctctcaactttcccactttcccaagggataaatttcaaaatatggtaagactctatcaaaggtagaactgccactagatatgtttttatcaggattaactctagaagtactaacctatgtattcctgcctcttcttcttgcctgtcagtctctgtcctggtctccttcagcctctcattttctcttgggcattgcctgtgctgacattctgacatacctgcttttctcctctttatcttgtttctgtgaccttcacttaccacttctgtgccattcattaatttgtacctttaatcctaaactccaaatttgtacctaattcgtacctttaatcctaaactccaaagctgtttttctccttgctaactggacgaccagaggaacttcattttattgtctaaaacaaaattcattattagtctcacaagaatctcgttttctctttttatatttcctttctcattcaatggcactaccatccaactgcctggcggaaacctaagagtaagtttatgccttactctaccatcccttgacagttggtcacagttccctgaaattcttcagatctctgtcctatggcagtcttgctgccactatatgagttcaaacatttatcatttctcacttgggttactatattagcctctgctcgcccccttcagtacattatcttaccaaaattcatataatatatcttaaatctatatctgctttaaattttttattgtctctcattgttatgtattcaagaaatatttatttaatgaataaatgcatttctaataacatcagttttctctattccaaaggacattatgctaaaacttagctggcgtatagaactttcttcaggactcttgttgctagcattcttgatgccatgttaattctcctgtgacatgtgtccaggtgctttagaatcttgcttgtctctaccaattgtgacaatgaatatgcttattattgaaagtaataataccaccttaaactttaataaaatgttaatcttcaaagcactgtaattagaagtcaggtattcaggtgctcaggataggcctggcactctttttagctgcatgacagtagaaagatatttaagtttttttttgttgttgctgtttttttttttctttttctttctttctttcttttttttttttttttttttttgagaactctgtcacccagactagagtgcagtgctgtgatctcagctcactgcaacctccacctcctgggttcaagcaatcctcctgcctcagcctcccgagtagctggtattagaggcgcacaccaccatgcccagctagtgtttgtagttttagtagagatgaggtttcaccttgttggccagcctggtcttgaactcctgacctcaggtgatccacccaccttggcctcccaaagtgctgggattacaggtgtgagccaccgcgcccggccagtatttaagttctttaagcctggattttctcatctgtaaagtaaaaatactaacccacctataacagagcattacatggtaaagcacgtatttcagtgcccgtcccataggaagtccttattttaaaaattagcgatagtggtggtaataattgtaatacactcttgtgcaactaaatgtaatagattttgtggaataatatcacttaagaattagagtatgtcttagaaatctcttaaattagttacagttttttacccaggttcatgggactctcaatagagtattgtgggtttttttttttttttttggacatactctaattttacaagaactctcaatatcagaaacttgaattaaactgagaacttattacatgttaatgtatttcccaggtgagttctggaacttcccctattcccagagaacctatatatattaaatgtatctctatatttaatagtggaatccaacagagagtgagatgtacaacccaggtaactatttttgtaccttgcctttgtgtggagaaaaaaggaaggatctgctctacccttgctaatcctagtatggacattataggccttatgctcatgaaaggttatattaccctaaaattaggcaaaagttcatattagagttccacaggcaaacttcctcctcttagatatactatagaggctattaggtatcttcttccagtcaccttaacaaacttttacttaatatctgttctgtttaagtcagtatgctgtgatttcgtgactaagtccataatctcaaacagccttcggtctaatagaggagacagatttacaggtgaccatagaatgatttagactactgtaataaatactgtaacttgcctcttcagaatagattcaacttcttttggatagattactctgcagttatttatatataattcctttttgagaaaatggaataatatagtttttttctaatgaaattgcagctcatgttgaagccttctgtgaacatcatatttaaggcagcacccctcagctctacctcttgaatcccttggttaagccatccttatatcttcccctgctccattttcttgtcaccatctgacatactacatatttaggatgtttgtttctattacatattcattcaatatattataaacttcacatggacagggaattctgcatgtttgtactctgctgtgtcctcagcatttaaagcaatacctggcacatagcgggcacttcataaatatttattaaatgaatcagtagttaaacaaatacagaagaatcttgttgtaacaaactcttatcaaatgttagcaaacattaagtatctgctttaacttaacagggcttattctattgccacagaacttaccccttgagaaattttttattttggcagtacatggaaatatccattattatatctactattacatgattatatatataattatgttgtaaatggttatatatccagtattatatgattgtgtatgattatttgattataaataccttcagtatttttacctacaacagaggatcttcaataggatgtatgttgtgtgtaagtaaaaattgtacagtccatatatcttcctctcatttccttaattggtattttataactttttggaactgcttcctccaagttctaagttatttgtaaaagtcaagagctaaaacatgagaatacataaagcttgtctcatatgccattgccattgtgaacttgataataataaatcttgctgtctttcttgaagaagaaacagtgaaaggaatactgttcaattccaacatcagctgtgtaaccgaggcatcgtaatacttttatgacaagtttcactacctttttgcctgtgccagtgtacctcaaagggatatggtaagcttaaattgataattttcataagattctagaaagtaacatgacacatatatttatttatatatatattcaatcattcagttacacataaatatgtctacatacaccaatccttgctttttagtatataacaacattgttctgtttgttgagtgccaaagtagctacttaatatgttcagattttggaacaaacgcagtgcaagctaagtatcagacaaagaggcaaagagaaggaacagatttctgggcatcagcctgtgttagcaggctatttcctagatcattttggagaagccttcaaaagaggaattcacatctctatttctgcttcttagagatcagcaatcttttttatagtgctgtgcaacaagagaaaatagataaacccagtgctttgaagtgacttgggagatgttgctacggatataaaaagcttactaccttagaggctgtggcaacctaatccatccctgccggaggagaagcatgctttttataggccccaagacaagggttaagtttatctgcttaccaggaatctcagcttgatgactcacttgccagataaaatttcttattaatgcagagaattccagatttggttggtgtggggctcctctgcaaaagacacgctgaccttacatgaaaaggagtattttattttgaattaccgcattgtgagaatgcagaaattacagatggagaaactatgtattgaggacttttgtaagaaaaattcacatataatagaacatcctgaaattacttagtagattataaaatttgtcctcattctgtatattccttagccagaaatattacatgtggtagtccctatatctataattatgattgtccacaatgataatactgtctatatttttaagaaatgttttggggctgggcacaggggctaatgccaataacttcagcactttgggaggctgaggcagaggattgcttgagcccagaagtttgagaccatcctgagcaacatagtgagacctcgtctataaaaacaaacaagcaaaaattagcagggtgtagtcgtgcatgcctttagtctcagttacttgggaggccaaggggagaggatagcttgagacttggaggtcgaggctgcagtttagccgttctcgcaccactgcactccagcctgggcaacagagtgagaccctgtctcaaaaacaaacaaacaaaaataaaagtttggcttatagtttaagtcatgactgaaaaactgtaatgatgttactggtcattacaggtctacatatgtcagatcgatatatttttagtggtgattaaataggtaatgaagaaaagagatgcatgtaattttttgctttgtgttaggtgatgagcctaggtatctcagaaagttccatgtaagttaaagaagaagatggaatcctatagtattcactttctatccatctcttctgttagtagctggaagtagaagatgtttctgttgtgtccatgaccctctgctttcccatttgtacttagcactccatggttaacgtgccgtttcaaaacagaaaatggcatacgaaaatccagatgcatggagtagaaataagatgattctagcttctttcctgaatctgctgtgtaccttcccctgtgaacatatatgtcgatgtatataattctcaatatgaacaaccggatcagggtatcttgaaacatataggaaataggaatatctaaatcaagttatattgattgcagtttaattctgtttcctcatctatttctactagagaatttagatgcgtatcagattgaccctaaagattctgatttttttgtaaagcattcatataaataaagggaattattttagagaggaaattattatttgaacaaatattttatcccagattacagatttactttgatgctcatggatatggaatacgtttaagtaaaatagcaaatagcattgcttatcattttaaggtcaaccttggggttgcttcaacttgtgaagcaaacttactgcattgtgaagcaaacttaactgcattgcaagaaatacactttaattaatgtcactacagtaatatgtttaacattctcatttggcattatgaaatggtccagtgcatatctagaaaccagaatgttaatggcaaagtacaaaatttgcaatcaaaatgctctgtgttctcccagaaggtggaaaggggataattaatgtaaactgtgtatgttacaccagattgctagatctaaggattgcactacagcaagtctgatggccacctgttataactgggcaataaaaagtggagagggttttaaaccactaaactttgggggaaataatacaccaaaaatagtacaaatagccaaatctaatttatgcagacatggaagccaggtgtttcatgtatcactttcaataagactgtgcgactaagacttatttcatggctgaattcaagcaagaaatattcttagattaaaacgaatcatgataatgaaagagaggatagttgctattaagaaatgatcacaagtacagatatactaatctcctgggaccagagcatgtctttatcacagtcaatcagttccaaagtggcttggaaaattgtcttttgtcaacttgatcattggtgggtgtgactgaagaaagaggatacagattctgagctatcataacccattttccatggaaagggaaggagtgactggttcgtgttctttcaggtattcaactttagcggggcattatgtatgttagagaatttttagccagagtaaacaatacttggtactttttgagtaagacttcaacaataaattttggaatgttttcaattgtgtaccaagcaacatttataaaataaaattgtaatatcctttcaaaagactgtcttcaaatagctaattgtttctgaatataagtcacacttttatttttcattttacactaaacacctagtgtgttaaagatgctacactaggtattatgaccattctaaaccacaaacaatggatctttccattcctcataacccccgtaattcaaaaggaatgcctttgaattcactaaaatatcttcatatcctgagaatatgagaggttcggacaccataattacctctagtaggttttataatatctatgctgtttatacagacactaattttatgtattgttatttactcataattcctgctcttctcctcaaagaatttaattttcagcaaagataagttgaataaaattatgttaaaaaagaaacttcccacaacggtttttttattccattcacctctcgtttatcactcacttctgatatagggaaatgtaaatacctgcttatttgccctttctgtcccatggtgtatttatatggggaagaaaaataacacatttctacattttctagatataaggttattgtttttgtttatatgcaaaaaatgtcccatctatagggatctcactgatctggcttgaaaacctatagtccagttaatcaaggaaatatcaatattcaagacagctttgtgaggaaagcactattattacaaccacgattattacaaaatcataaggcaaccaggcttgaaatgtttaattaaaagattcaaaatccttgcctagggtgaatcagaaaaggttttcattgttcagggagtgaactctctgtcattgtcctatacattgtcatgaccagagtacctgaaattaaagtgctttcagagattctttgaagcaatctgagggtaaacagaacacacctatgataaaagcactgcatccattgtagctagggagtgctctaaaggaggagaaatgtcacagcagtcacagatttaggttgtttggggtcaacatatgaagaatctttaatttctagataagaaatttgaaccttgatctatatagataatggtaagctattaaaaaattttgaacagaaaatcataaggcaatttagaaaaataatgtaatggttgtatgcaagctgcattgaaggatggaaaatctaatgacagtaatgaaccaattacagtgttctttgaagaacaatactttagtcattttctccatcaagaatttgagaaaggaatagagacctcagaaattagccttaaagtatatacttggtgctgattgatcttttctgacaaaattgaaagctcaaaactataactattcagctaaacaaacatctattttgcatgtgccaggcactctgctaagtattatagattgagaaatgcaaactgaatgagacccagtttctgactctaagactgtcctgtctttgggggtggatgcacttgtaatcagattatctggatacactgtcagtagtgctacagtagaagtctgatagggtgggtgagaagcccattgaagcaaacgttttccagcctagagtgttcaaagactccttcctagtggaggtggtcagtctgctgagtcttgaaggtatagtaagggctaaccagaataaggggagtgtttattttgagtattcaaagttaaaggtaaaccccttaattctggaatgtcaaagaataggcagtcctgagagaatgtaataatcacacatacaccctgggttcaggcaatatttacatttgcttcctttaacaagctagcagagaacttcactgggattggtcattctctcctggactcttctcctgctggttcctatcttagtgtgtcagggacctctgccagcaagactttcttcttccacttatgcaaggaagttggagtcccttggctgagctctccagagaggtacaggggcatcagtgctagagagttaatgagagtatagactgcctgggattttatgctaaaacttttaccgggggaattatgatttatagcagacgcatatcttagcacagatcttcatcacagctcccgtagtttttcaaatgcaaagaagcttgtgtacattgctgactcttcatgtgtggttcctcctccttttttaaaaacaccttttttaaaaaaataacatgttgaaaaaaagattttttataatcatgtgttatagactgagtgttcgtgtctcccaaaattcatatgttgaaatcctacccccagtgtgattgtatttaggaggttgggcctttggaaggtaattcgttcaggagggtggagacttcatgaatgggattagcccttataaaaaaaagagcttgtttctctctctctactctctgccgtgaccatgtgaggatgcaatgaatagatggccatctgcaaaccaggtagagggtcctcaccagaactgcatctgctgacaccttgctcttgggcttcccagcctccagacctgtgaaaaataaatgttgtttagctactcagtctaatttgttaaagctgccagagctaagacaacacatttatgacatttcttattaacactatgttaagagtttagaaaagtaggatgaaaacactctatccaatcaagttcacttttttaggtggtggaggtaggcatcttttggaaatacttacagtaattaaatgctttacaaggaaaggagcggacaggtgatagtttaagcactaaagttggaaatcttgtgaggttttctgagatttttttttttttttgaaatggagttttgctcgttgcccaggctggagtgcaatggcacgaccttggatcactgcaacctcctcctcccgggttcaagcgattctcctgcctcagcctcccaagtagctgggactacagatgtgcaccaccatgcgataacaggctcatgccaccatctccggctgatttttgtgtttttagtagagacgaggtttcatcatattggtcaggctggtctcaaactcctgacttcaggtgatctacctgcctcggcctcccaggagtgctggaattataggcgtgagccaccacgcccagccgtgttctgagaattaaagtatggttgtcccttggtatctatgggggatttgttccaggacctactgtgcataccaaaatctgtggatgctcatgtccctgatacaaaatggcatagtatttgcatataacctatgtacatcattctgtatactttaagtcatctctagattatttataatacctaatgcaatgtcaatactatgtaataattgttatactgtattgattaaggaataatgacaaggaaaaaaatctgcccatgttcagtacggacacagttttttttctgtatatttttgatccatagttggttgaaaccaatggatgcagaacccatggatacagagggctgattgtatttctagaatgtaaatgtggggtgggagttgaagatgtgatttatgagacaggactggaggcaaatggacttcatcttgtggagcctgaagaaccaatacctaatttttttttttttttttttttgagatggagtcttgctctgtcgcccaggctggagtacagtggtgcaatctcgtctcactgcaacctccacctcccaggttcacaccattctcctgcctcagcctcacgagtagctgggactacaggcgcccgccaccacgcccagctaagtttttgtatttttagtagagatggggtttcaccatgttagccaggatggtcttgatctcctgacctcatgatctgcccacctcagcctcctaaagtgctgggattacaggcgtgagccaccatgcccggcaccaatacctaattttaagcagaacattggcaagccagatttaatatttggaaaacttactgtcataaccaattgaaagactacttggttatagaggcaacattgtagataagaatgccagtggaattatccatgtgagaattatgatttctgaattaaggctgtggcaacagtgatgaaataagaattatttgagataaatctagaatttccttggttttcttatctatgaatggaagcctcaaaattttgccactgcaagaggcattatttctatctcacccaaacatgcttacatgaaactggaccttacattataatgtagcctgcttgaaatgtaaacaggatccctgtagtagtgcttccatagcctgacaagatgcaacaagatatatcctgtgtttgttcatataacataccttggtactataaaatacgagttctttactttctctggtttctcattgagcttcatattaatcagtagaattattttataggcttactaaaacatgttttagtattgcctttttttttttttggtcagattatttgttcttgctctatcttgatcccactcattcctccaaacgctgtattggctcttccatcttcaaattatggaatcaaacaaaccaagaatttcattattctattgaagcctcactagagtgcagtacacatctttgagagttaaaggaagcttattaagcataatctaaattttttataccctagtgtttaattttgttaagttgctatactaatgttagttgtaactctcagacagtagggtaaacatgtgccttggtttacatgggatagtcccagtttatgcctgtattcttggtgtaatttatttataatgccccatttttactttcaaaagtatctcagtttgtacattaaattgtatgatcaccctatcagggagagccacaaagaaattatccatttatgcatttctagaattcaatttatgggaagtaaatgtaattaaaacatgctgacagccagtgtgcctgctgtagacttcatgcatactgtctcttaagtctttttgaggacaaatggagtaaaacttgtcacttatttactaaaagatttttactgctataatagaaaaatgaaattacttctcttttggtgctatatgtccctcaaccagtcttgtcatgattctattaaggtaaataatgcaaagctgagttttgcatttattttctaaacaaaatacacactatgactatttaacttatggtggaaaacagagaaccttatatggacttaaacgtgaaaagaatcttgaaaaatatgataatgaatttagtgcatccccttcctttacagatgagtgacctagatcaccaagaggtcatgtaacatatatgtggttccatggctacttaagtggcatacagtgctatagctagacctccaatgttttaatccagggtttcaaggtccttttcgctagatgggattgcatatgaaaaccacaggccacctttattcccatcacactcatcttgtaaacaaaaaggtccatgtaaaatatcctgactttaggaaatatatggaaagcagtcagaaattgatattttacattttatatatttaaaatacggcataataggtatgtgctgagtagctttatgtatgtatgcacgaatattttttaaacttttaattgactatatgtttatggggtacacagtgatgttttgatacatgtatatacattgcggaatgatcaaatcaggataatttgagtatccatcactttaagtatttatcatttctttgtggtgagaacattgaaaatcctcacttttagctcttttgaaatatataatacattattaactgtcatcactgtgctgtgaaatagaacaccagaccttatttcttctaactgtaactttgtactcattgaccaatgtctttttttcccccatacaacaccaggctctgataattatcattttactctctacttctatgagtttgacttttatagattccacatatgagatcagacagtatttgtttctttgtttctggcttatataggttcattcatgtcacaaatgatagaatttcctagtttatttttaaaggctgaattgtattccattatttatgtataccacagtttttaacccattaggtggatacttgggttatttccatatcttgactattgtgaataatgctgcaatgaatgcaggaatgcaggtatctcatcagcataccgatttccattccactgggtatgtcccagtagtgggattgctggatcatatcatgattctattttcagtttttagaggaaattccatacatttttttgaaaaatagctgtactaatttgtaaaaccaccaacagtgtatgtataaggtttcccttttccccacatcttcaccaacacttatctttcaactctttgataatagccaatctaaaagttgtgaggtgataattcattgtggttttaatttgcattcatctgatgtttaaagcatgttgagcatttcttcacatatctgttggccatttctatgttttcttttgagaaatgtcttcaaatcctttgcctatattttaaaagggttatttgttatcttgttacagggtagtctgagtttcttgtatattttgaaaagtagccccttatctgatgtatgatttgcaagtattttctcccagctcatgggtgcctcctttattaattgtttctattgctgtgcagatgcctttcagtttgaaccaatcccatttgtctattttagcccttgtaacttgtgattttggggtcagtatctaagaagtttctacccaaaacaatgtcggtcatagagcgttttctgcatgttttcttcttatgttttatggtttctgctcgtatgtgtaaatccttaatatattttgagttgattctttcataaggggtgaggtaaggacccaagcaactcctagactcaagcgatccttctgccttagctttccaagtagctaggactacagatgcgtgccaccatgcaaagctaatttttttttactttttatcttttatttatttatttatttatttatttatttatttatttatttggtagagatgggatcttgctatgttacctaggctggtcttgaactcctggcctcaagcagtcctcttgctttggcctccgtaagttctgggattacaagcatgaactaccatgcctggcctccaatttctttctttcttatgtagatatctagttttcccaacatcatttattgaagagactacactttctccaatgtgtgttcttcacaattttgttgcaaatcaattgaccatagatacgtgggtttattttggagctccctatcctattgcatgggttgatgtatctgtttttatgtcagtatcatgctgttttgattactatagcattgtaatatattttgaaatctggtagtgtgatacctccagctttattctttttattgattattgctttgtctatttggtgtcttttatgactccatatgaattttaggaatgtttttttctatttctgtgaagaactacattggaatttttatagggattacattgaatctgtagcattgtgagtaatatggatattttaacagtattaattcttccaattcaagaacatgggatatcttttatttgtgtcatctttaattttttgttaatgttttatagtttttagtattcagatctttcacttataatttgattaaatatactcctaaacatgttttgatcctattattaatgggattgttttcttcacttctttttcagacggttcgttgttactatatagaaactactgattttttattttgcaccctagaactttactgaatttatcagtttaaaccattttttggtagcttctttaggattttctgtgtatattaataagatcatgacatcaacaaacagatacaatttcacttcatcctttcctgtttggatgctttttatttctttctcttgcctaattgctctggctaagactttcaggactatgttgaagtacttaatatgatttttatcttcttaaatttgttagacttgttccatgacctaacatatgatctattctggagaatgttccgtgtgcacttaagaagagtgtgtcttctgttgctgttggatagaatgttctgtatatgtcttttgggttcatttgtggtactttaaagtatagttcaagtccagtgttttcttactgattttctgtctggatgacctgtctaatgtttctaatgtttaaagtggggtattgaaatcttctactaatattgtgttgaagtctttgtctcctttcagatctcttaatgtttactttatatatttaggtgctctaatgttgggtggacatatatttacaattgttatatcctcttgatgaattgatccctttgtcagtatataagaatcttctttgtctatttttactgttttctgcctaaagtctattttgtttgtattatgtacagctgcccctgcattctttttgcttccattttcatggaatgtcttttttattccttcaccttcagcctatgagtatcctttaaagtaaagtaagtctttaaaggacactcatagactgaaaatgaaggaataaaaaaggcattccatgttgagtctttaaaacaatatattcaaccactctatgctttttgattggaaaagttaatccatttacatttaaataattattgataagtgcagacttactagtgccattttgttcattgttttctgtagagcaattgttttttagatcttctgttctttttttcctcttgtgttcttcctttgtggtttgatggctccctggagtagtatgctttagattttttcttcttatcttttgtgtatctcttataggattttgctttgtggttaccctgaggcttacgtaaaacatcttatacttaaaactggctattttaaattgataacagcttaattttgatcacataacgcatactacacatttactcttctacttcccacattttatgtttttaatgtcttgttttatgttttttataatatataatcacttgaaaaattattaaagctgtagttttgtttttggtaattttgccttttatcctttatactagaggtataattgtttacccagcactgtttcgttattagagtgtattggatttgacaatatacttgcttttatacttaaagttttatacttccatatattttaatgttactaattagtatcctcttcttctgcttgaagaactccctttggcatttctcataagacaagtctagtgatgataagctctctcagtttttgtttgtctgagtaagtgtttattacctcttcattttcaaaagacaagattgctgggaatagtattcttggttgacagaacaacccccatcccccttctggattttgaatgtatcatttaactcccttctggcctgcaatatttctgctgagaaatacactgatgcttttgtggagattcctttacatgtgacaattcactttttccttgctgctttcaacaccctaacttttgacattttgacagtgatgtgtcttggtgtgggtcttttttggatttatcttatttgatatatcgtaggcttcttgtatttgctttctatttccttccccaggctggggatgttttctgccattatttcttcaaatatattttctgttcttttctctttctcttgttcttctagtacaccaataatgtttaaattgttatacttgatggtgtcccataagtctcttaagctatccttaccttttttcacttgtcagatattgctgaaggattaagtaataaaaggactgggaattgaccactgagttttgctgtgtagatgccatgaataatcatgtttgatggagtaataaggggtagcaaacttatctcttatctgtattactataatgatctctttatatctcctgactttccttcttgcctttccacagtttattctcaacacactcagcatgctgactttttaaaatatatagatcatatctatatattttaaatatctatatattttaaatatctatatatttttcacctttttcacattctaacttatatattcatttaaaaaaacctttttatcaagtgtatattatccttcatttgaatattaactccatgaaggcaggggcttatgtatttttgccgatatatcctaagtgtttaggatatttcctagcacatggtaaatgatcaacaaacactggttgaatttttcttgtcattagcttgtaactaaagcttttaaaagcatcagatgtatatctgagctaataagtatgatgtgtttgctttttttcaaaagctactacctgttggaatcatttccaagtaagaaagtactattttgtaggagttaggtgatgttaactcagctgaataattagcttcttgcctctctggttatttattcagtttttcctgagtatttatatgctcaagggaagctcagtaaatacctgttgtctactctgttgcaaacactgtgctagcggctgtgattcataggcctcctctagaaggagagattcacaagtatgtcaatgtttataaccaagtatgactgggtgatgttagaaataaatgcaccagggtttgggttcatgtagaaaagacacacttgcagtctataaatggtctattttagattgaacactctgtcctctttccgatatctctgtgaatttcaaatgtcctacttacagccagaactaaagaactgcaaaaatgatccaaagccaattccttttctgtcccacctgcagcttgcattgatcctctagtgtttttaatcaatcttgctaaatacttcctgtagggaaaatgagtagtgatgagaagtaatcttgctgctactttcttctgaaaaatttaatgattgatttacagatattgcctgttcatcatgatatcccattgtagaagatggggattaaatttcagtcttaaaggttatgggatccctcaaggcttagcgtatagtaatgaaaaattgagaacctagaaaggggatttcggattctgtatagtgaataaacttttatcaggccttgcttctgatatgaatttaggattatgtggataggcatatgccatgagctttttactgcagccttagaactttctctatattttatatacaatttcttatttatgtatttctcttcagtttaaagcaaatgctgtagtttttctgaagtcataaataatctctgggcctttcccaactggtctgtagaggcccttttaataaggcctcctaaacataaatagaaatcagttacctaacttgatatcacaaacagaagccatccctttgataagtctttgtctaatggcttacaagttaactctttcctctgaatattaacagatgtcctggaaattgcctgtgtatttggagtaatacatactccctagagtacatggtctttctgagccacaaaacctaattcttcgaattctaaaaagatgtccaaggagaataatagatcctttagatgtatggtttgcctggtttctgtttctttttttcttttttgtgagacggagtctcactctgtcgcccaggctggagtgcagtggcgcaatctcggctaaccgcaacctctgcctcctgggttcaagtgattctcctgcctcagcctccccagtagctgggactacaggtgcgcaccaccacgtgggcccagctaatttttgtatttttagtagagacagggtttcatcttgttggccaggatgatctcgatgtcttgacctcgtgatccgcccacctcggcctcccaaagtgctgggattacaggcgtgagccaccgtgcccggcctgcctggtttctttgatttttaatttttgatgttcctgggtacatactagatgtatatatttctggggaacatacagatattttagtacaggcatgcagtgtgtaataatcacatcatggaaactggggtatccagcccctgaagcatttatcctttgtgttacaaacaatccagttataatcttttagctattggtttgcctgtcttaaaatattttaagcttaatgtgaagcatgttacccttagtaaaaattcccattcttcttacattctgataaggtcacagataggaaactcatttcagaacttggttcttctctataatttacttttagtgctgttatggaaccccattttgaagtatacattcccacagtatggcaattaatctatttcttctttaggctaatgagtcttttcttgcaatgtcttcatttattcattcgtcaaactcttgaacttcttgtatgtaaagcactttgcaaaatcactggtataaccattgaaccagagaaacacaacatttggcttcatgacctgataccacctatttctctaggaattgaataggttctgttggtgcttggttaacaggttattattctaaagtcatgccatctttatggatcacacattaagcctttttaatgtattattttaaaacttaaacaccaatattctgtatttttacttattttttgtatgtgactctatgtgactcccagttttaccttccttgcttaggttgatgtgatcgtgacactgggaggccttgctgggcgttttgaccagattatggcatctgtgaataccttgttccaagcgactcacatcactccttttccaattataataatccaagaggaatcgctgatctacctgctccaaccagtgagtcaaaagtgaatataatgtgagccctttccttcacaaagcttctaccacttgagtagactagaagaaaacattggccctgcttgggtcttcgaactgtgagtggaattgaacatgtgcgctttcttgtggccactttagttttgccccaggtcactgaccagcaaaaatgtgaaggagaatcctgaaagttttcattttattgtgtctaaaaaacaagagaaagtgttgtaactctaaattgactaagaattaaattgagcacttttgcgttttgaacagctgaatgtgaatgacatttgagaaaaacctcaataggggaaacacaaggtttggcaaatgttgctaatgtaattcttacgtattttgagtgttgtcattatcattggatataactggaaactgggtttgatttcgttaggcacttagaagacagtctttagcttttactattcataagttgcctggtgattagtttctctgtctcagaataatttctaatgatgtctttcatttccagtgataaacattaacgacattttctctcaatgtagtgcatagaacagaattcttactaaacaaacaaattttatgaggtttattggtggatttcagttttaaaatatcatttggtaaccttttttttaaaagatagtggacagtactttccatttttgcctctcattgtggtctactacttatattttgctgctaccctgttgctacccaccatctgtagcctggcattactagaaattgtagtttggttaatagggtgggtttagtgcatgctcactattctttagccagttttgcatttttttcctggatctttgcgtgtcctagccatgttgctttctggataaatatggaaggggagaagaagaattcagatttcaaactatactatccatgtattttgtcaaccgttacagactgccttctacgtatttgttgcactgcctagcaattaaggataaaaataaatagttgcatgtgatctttgctctccagattaagtgcaatgaaagatccatttatacaaatgtaatcacaatgcaatgttgaaagattagtaccaaaaaatgaaataatagaaaactggagcatgtgtgtagtaagaaaagtcttcacagaggcactcacattgtattcactcaattaattcaacaaacgtttactgagtacctgctatttgccaggctcctttctagggatagagcagttaacaatacaaacagaaatcctttcatgcaatgtaccttctactaagcttacaattcaacagaatcttcaaggatgagtagattcttgctgtggaagatgatgggaaagttatttaatgcaagaagagccagggaagaaacatggagatgcaggatgtgttataggatttgcaggtaattctgtgcagctaaaatatgggctgtgcagctacaatatgggctgtggtatggaagaatgccagaagataagatacaaaactaattgggatactgattgtgaagagctttaaattccacacaatggaatgtgaacttctttttgccataggttttggaaagtcattaaaagattttggttagcagtacagatatgctttttagatttcttatcaatttatatgtttgttaaatacccatagactcccaacagcttctgaagtttgaaacttactactattgtgaagcaatgagctttgttctattgcactgaattgatggtatgactgctaaagtattcagtcataacttgtctctgtatagatgctctggtcaatatattactagttaaagatgcagtacaatactttttaaaattataattggcagattcactgatagaaaaagccacatctaaaatatgaattctacattaaggtatttttactgttttgggtttctgtgttttccctataattggtataattatgagctttctgaaatgcatttggcttgggattcattggattttcttccatctatagattgttgtctgtcatcatttctggaaaactctcaatcattatgttttcaaatattgccctattctttttctcttttcttctgtacctccaattaaatgtatttaagatcctctacttgtatcatatatatctcagcactttcatattttctatgtcttaatctctctgggcttcattctgaagttcttcaccacctctgtgttctgttcactgtcccgcttcagctctacctatctgccgctagacccaccctctgcgtttttaattcctgccatgattattctttcttacacgcttgccctttactcacattttcaaggggctctttcttaaaacataattatcaaactggttttatagtctagaataattctaatgtaagccagctgccttttgtgttcacttttgctttcacatttcgtgacctcaattccttctctgttttatgatttttggcaggacctcacatttctgagaactttaagtgtgggaattatttgaggtgtgggttaaaagtaaatccaaggagaatttacatttgcttttgcctggctgctgagtggacttgtagcccagttctgtgggagcactaagtacttaggacattttgtctgagactattttggaccacgttgtcagtgtagactctgaatgtaacactgctgagaatctgatgtctggttacaaatgctcaggggagacttttctcatcttctcagttatggagtgccaaagtttggttggccacttttcctagcagaccagtgggagtgttgttcatattcatcttgatattttggatctctgctttacgtggtacagcatccttttagacgtcaaccttgggcaggccttgggctttgtcttctgacaaccttccctagttgggggctttagaaactgaagctcaggttcatctgatttgctaaacactctccagatgaaagttagccttggccttctttttatatcaaaatgtagtttttggcttctgggcaaaattcttatttctttccttttctttcttttttttttttttttttttggagacagagtctccctctgttgcccaggctggagtgcagtggcgtgatctaggcttactgcagcctctgcctcctagaattcttttttttttaaagatacatttgatgcattttagaagattctcttaattttttttttttagtatttgtattgttttcagttggccagggcactaatctatcatattgcctctgtacctcagttacttcccacccccccctccgtctatgttgcagtgatgatcaactccagatctgagaggctttccaagattaggtttattaagtttttttttcttattaatagaatatctgatgtggcttgagaggcatcccacattttatatctaagctaactggaacacattgctgaagcagggaaactgattactagaatgtggcaccatgttttttacaggccaggcctgcctataacctgtgtcaccttctgcaggaatgaagttctgccgccccagcccaactgcaaaggcagtctaggaaatgaagcttgtgggcccaggaagaggaaacactgacttacaaagcaattctttctcaaactgccagacatggatatcttgaaagaaattctggaatcatgaccctacataacttataggaatgtaacatacaatgtgttaggctttagttagttattaaggtggaatccccagttctctaaagtggtaaacatgttaagggtacctgcatagccaaatccccaaatataatgcaatgtagattctctctgtgataattttgattttgtgtcattggaataactacaaaattaccttatcctaatgaagtaattattacatagtgtggtgcaaaaagaacatgcaaaattacactctctgttctttaagggagtgacaatggcaggcacaggcttccacctgtggggttagcagtgcagcctttgctcgtcttggccactctgttctagggagttctttatcgagacacagcctggctctctgcttttctatcacttttagtaagggaatagcaagaaaattagtaacacaaatgcatatgttgaagtgaatatgtttgggggtttaaggtatggatggatctcatgtgatccaccatattggtaacaagttttaattgtatacccgtgaatgggattaatactaaaaatcagttaaaaactactagagaccgggtgtggtggctcatgcctataatcccagcactttgggaggccgacacgggcctgtcacctgaggtcaggagtttgagaccagcctgaccaacatagtgaaaccctgtctctactaaaaatacaaaattagccaggcgtggtggtgcatgcctgtaatcccagctacttggaaggctgaaacaggagaattgcttgaacatgggaggtggaggttgcagtgagctgagattgcgccactgtgctctaacctgggcaacaagagcaaaacgtcgtctcaaaaaacaaaaaaaaaactactataaaattactgcacagaagcattctacatcctagaaatgagacttgcaccactggggctgaaatggctctgtcaggtgttacttcatataactgcatcattaatatatgtgatacatgcactaaatgtgcctatacattacatggtgtgcatactttggggaaggtattcagaatggacatctacagcagactgttcattatttttagaacatacagtcacagtccggatgggcaggagaaatgttataaatttaaactgaaatcatttaaaaatattgcaaaagtaggcttaagaaaatgtctcgtgtgctttagcgccaaataaagaatgacttcaaaactctaaatttttaaatttttttaaattaaagttaacatatagttgttgaggaggaagataatactgatacttttacaagaagcatctcatctgagccttataacaatactgggagaaaagcaggataatatggtcacacagtgaagtgttttgtctcaacactttttccacaacattacatttcctccttcatggggttaatggactaagatgcaaataataaactcttgaaacaagtcacagcccataggctggtaattgtccataagcagtgtgtaactgatggccagttggtgtatgcatgtgtatgtataaatatatgtgtgtgtgtatatgtgtacatatatgttttttccactatgatattattttcaagtaaaataaatcttggatgcactttaaggatctacctcatcttgttgctgtatccttaaggaaaaatgactttctgaagttttataataaaatttacatctaataataatctttcatcatttaagcagactaagtgatttaccattaagctttgctaaagtatgttaaaagtggtaaaaattcaatataaatgttaattattacgagtgttagatttgagcctagagtgttccagaattttttttcaattagatgatctgaaattaaagataatagtaggaggaataagtcatcttacagcaactgtttatctgatcatttttttagtctagtaacttggtaagagagcttgtgttatatctgctacactaattttaattggctagaatagtcctagtccctggaaccagaatgcacttttcttgatctttttaaaaaagcctatcctcatatcatcttagtctttctgtgatgttctgtgtttcttttggagtgtttacatatgagactctcatgagactaggttgtgtaaataagtaattatcttccattcattaagattattttagtcatttcggactgacctatatgtcatagtagcaattcacttaaagtgtatagttgtttcagtctaaagtctgtgttctcttttcagtcccctctctgtggtgtatttttattagttataaattgaattttaaaacaaggatacaatgaggtagttccagttaaaatgaatatgggaaggtgtttggaatttttttagctggttgttttttttagcatgtaaggtttttcatattgtatttttggcatatttcacttactatgggtcaaaatgtaattatgagtgaaaaccttggtaggtagcatttactttgtaggaatgttcaatttgccattcgaaaaatagaaaattcaaaataggatgcataatagtcccttcctttaaataaacatccttcttttacttccaaaaatgtgttcttgataagacatcatcaccttttatgaggaggggatgctatgaaatagatgacagacatttcagatatgaaacatcgctgatgtcagtaactagttaggccatcttcctgctgaagagtcaggtgctcagagccatgtttatcatgctgcctgtgtggagtgcgggtggctctaggtttcacatacattctttctcattttctggtcctgtgcttctcaggagtacagaaacattagcttctgtacactgagcataaattatcttttatctccaagttttatggcagtttgtaatacaagttaataggatttataaccaagaaatgagatgtccaagagttaataaggcatggcttttacattatcctaaaccttgctcggtgattcccgctcaggattccagtatctgatataggagaaggtggcacagagaagacttctgtcagtttttatctcacttgagcaaacttgcaaatatgttgtaaatatttcttcctcatcattttagtcatgctttactgctgcttgttttttttttctctttcaccagatcaattatttactatataatgtcctaacattatttacattatacatttgtaatgctggtaatgaatatgataaaatatgctgggagtttgatagaagctgaatattcatgatataaatttgctatgcctgatggtttctgctgagaactgggcgtttgggtcggtctacccttgtgtgcacatgtccagcacaacctcatcagtgataacatcaaagaagtgattctcagtgtgattttgagtaggcgacagagagttctcaattctagacaacactgaaatcttcccacactatttattacccgttttaattcccttctttggaataatcattattattttattcttcctctgtatctttcatgtaatttttattgttgcttggccttttagaattcctagtataaactacatagtatcacagaactattaaatatgtattattaaatataataaactattaaatagtgtgaatagtgtaaagctttagagatcgttttatagatgagcaatttcagagacatttatgtgatctgcccaaggttatatgcagtgtttctttggtaggtgattgatactgaaattgaaaaagatctgatgcagtaatagtctgaaaaaggaccactaggcatttcataccagaaatgccctgttacactgaccttcccaacctccctccgccttccaaaaggcgcattgtgaatacctgttcctacctggcctacacccacctcagcttgttgccctgggaaagttttgccactcagggttcaacgcctggccgaaatactctttaccttcaaattgtgtccttgcctagctctgtcctttctttggcttgtttgctctgccatgccatgcagcaggttcttcttcacatggaatacacacagacacatcttcgctaagcctcctcttcttttccctctcttcaattgttgcccggctttctagggaacaattttcaatactcattctctccttcttctctttcccctttcttttgtgttgtttcctcctcctctacatgacatttaaaaaaataacacaaaaacctatcctgttgtagtatgtgttaatctcatacatataagcaggaaaaccttgtattttagtatgaaataagacaataaaattccagagctatacagttctcattttttaagtgccctagtgttccctttaaatctccatagaaaattttcctctatggttttatccatgtttaattaaactaattttcatttaagaagttaaactacacacttgtctttaccttgtagctattgttgtctgttttgttgattcacagagtaggatacttcaaaaacaaacattcagtaaatacctatgatgtgttagacactgtggtaggcattcagagtacagaaataaaaggcactgcctttattctgctgctcacagtttagtacaagagacagaataaatattaaaattcagaaatatgtatgagaaaacactgggagcaagggggatggcaggaataaagcatcttacccagacgggacacagggccggtggtccccaaccctaatacctgccactcacccatgcagcatgcaggctctttgaccttaaagaagcctttcactgagaaagatttataggaagatatccatcagcaaaaacttaaggtgatccctcagtgattccaaagcagtataggaggaaataccgaattcaatcttcatggaaactgtttgaaaacttacgtgaacattggcctttcctttcagccatgagtgatggagaatcagttttggagacttgaatagtttctaagaaatgatatcaagactccatatgtgatatggagatgatatctgaactcaagactgctaagaagtcaggcaaagaaaggaatagtgacatttaatgtggaaggaatataaagcaagagaacttggcacatttggggaacagcaaattgctggatcacggggagccattggaggtgcagctggagggaagcagggtctagagcatgagggcttgcttgaatccccaggaagatggtctctatattgagaataaaggtcaggttttaagggtttttttaatcaaaggagtggcatttgattgacattttagaaagtttaatttggtgggagtatagattgtttatggaagaaatagaggccaaccaattctcttggaaatccaaggaacaaatggtgagtaaacttaagtaaacatgagagtgaaggaaaaatgatggagtttgttgggatgtgtgctcagaagtcttcatcgtagaaatgcagagggaggagtcggtataataactgcatcctgcattagggaactgggtgctgttcttctttgagatagagcaaatgggaagagcagatcaaaatgtgaagatcagcagttgactctgggatataaagagaaagatctatctttggaaccaaatggaattgcctaaaaggatatatgttctggcctggaggtataccttgaaaattgtcaatatgtaaaaaggcaaaagagtgatgagcttggatatcaagaataaataggatacaatggatttggcagccaggaagaaatttgataaggtagaaagccaggaagaaattttgatacgtttttatggcacagtatgggtagaaactatattactatgagttgagtattaaatgggaagggcagttgaaatacatttgttttcttttgtattattgtttacccttttttgttgttcccttatagaagttgatttttttgtgctaaactgggaactaataatggcttataaaactgttttggtgagaccatttttccaagttaaaaacaaaaccatggcacacgtatttgggattttgcctttgtatcttgcgcagcatgactgagagctactatgctgcatgtttgtaaagtgctgcagatattcatggacactaattataccagcatacactggagaagtacttttcaccctacttttaaccaatactttcttcaagaaaaaagaaaaagaaaaagaatctcctggcccaaaccccagctccacatctcttataaacccttcgacacctcttctacttgaacatctgtggtatggggctaaggcatggtggaactctgtgtcaaaccttttagactccttttctggtctagggaaaactggttcgaacattccacaactactcttttctctgcttttttgaactcactgtacactttcaaaaatatttttaagtaattcttgtcttttaaaaccctactcaaaatttttgtcttctatggagcatttccaaataaaccctctaaacctccttcatctggatcatttttatcttcttttgtcttcattccggctgctataacaaaataccataaacttggttttataaacaacaaattcatctctcatagttatggagattgggaagtccaagatcaagacgccagtagattcagtgtctggtgagggccccttggctggttggctctttcttactgtgttcttccatggcgaaaggggcaactaagctctctagggcctcttttttaaaggtactaatcccattcatgagggctctgccctcattactaaattgcctccctaaggctctacctcttaatactatcacattggtgattaggtttcaacagatgaattgggaggcaagtgcatgaggaacattaggaacaaccaaacactttttttaaatttttttttctcctttgggcctcaaatactctaaacctaaaacaaaatttattgagttataacttttcttgtttctgaactttaaaaaacaaataattgcgtattttgataaaagatgaaataacaattttcacagtttaatgctagccaagtctaaataaataggaagttttagataatctaaatgtattattccattaccagaagcatccagtattgcctcctcttataaaatgtgggctgcctggacatccctggttaagagtcagaggctataacttgatccacttatttcgcatttgacacttgccttttccttgtattttgggtgcttacttgggacagtaattgtttcttttggtggttggtagcatgttactgctggacaaatacatcaaatacatgcagataatggtggtggtggtggtggtggtggtggtgggctttaaagcaacctaggtatgatgatgtttcaaggggaaaggagtgaaacactaccctgatacctgcctctcacccacacagcatagaggttccttgaccttagagaagtctttcaccaaggaagatttatagaaaggtgttcatcagcaaaaacctattgtgaccctcagtgatttcaaagcagtaagggaggaaatatcaaattcaatcttcatggaaattgtttaaaaacttatttgtacattggcctttcattttcaaccatgagtgacagagaatcaatttggagacttgatgcaatccataagagtgttgtgtgcaggtgcaacaatagaaaagatggcatcagcatttgtctgagctctgtcaccataatttatcataatccaattctaggtaaagtaatggaatattggatgcaggatgtcatcttttcctttatcccccctcccacagtcctctgtggcaaggacactggtacactgtgtcatgtatacttagttcaattgagcattgctgcagcatcttcctttgattgaaaacaaaaggttgccaatgcagttatcaatgaactgtgaagtgatttgagtgttaccagcagggaaatgaaatgagcctctgggaagaagattggcataagtgaaagtttctatataaagagctccatacagctccagctgggttgttctagttctcggccaattaaggttttttcctccaaatgtgggagaattttcatcttacttgttctgaaagtaatcaaaactaaaagtgaagaaaagtggaaaattttacaaagaaagttaagctgggacaggtggggctggagggtatttattcagaccatacatttaccctagatattttaaagctctttcaaggaattgtgtaagatgtctccctcccccacaatacacacatatacatagaacacatgtaatatataagtacacacacgcaccacacagttttactaagaaaaaggaaagtaaggattctagatcttaggtctattgagaaggatttggttttttttgttgttgttgttttttttttttttttttgaaaactagtgtgtttgtcttttaaaagctctaattaattcttcataactttgttattatctgaattatgatacttgacttacatatatacagaatagtataccagtggaatttttttttaaaaagtttcagagtctgaaagcaggttagcaggatataacctaaggtgatagacacacacagaaagagaaacttagtttgaataaacatagaagaggagaggtattcccaatttcatattgttttctgaatcagactgagaaactgcttataaaatattaagtagatctgatagtctaaacattgaagatatactgaatattaatatactaaatctcttgaccgccgtgcatgatttatgaaatatcctctgtatccaaaaggatggaagattaaaaaacaataacatttttacttatatactgaacactttggtccacttaacacttttacaatttatgaactaccttcatcatcatctcatttgcttctcccagcagcccttttaagtaagcaggctaggtacatttttcctacttctgagatgaagaaattatgcataggacaacatagtgaatccatggcaaatccatcaacaatctaggaattttctgaatgctgcttctataccttttctttataagaatccacagttactctctaaatgttattggatacatatggaaggctccaaaaggattaagaaaaaaataaccagttttacatatcttctgcgcactatgaggttcacctaggagtaagcatttgtattagtctgttctcacactgctaataaagacgtacccaagactgggtaatttataaagaaaaagaggtttaatggactcacagttccgcctggctggggaggcctcacaatcatggcagaaggtgaaagaggagcaaaagcacatctgacatggtggcagggaagagagagtgtgcagaggaactgccctttataaaaccatcagatcttgtgagatttaatcagtatcacaagaacagcatgggaaaaacctgcccccatgatttgtttacctcccactgggtccctctcacaatacatgggaattatggaagctaaaattcaagatgagatttgagtggggacatatccatatcagcattgaaaaaatctatatggcttttttctccccaatcaattttttaattatgaaaattatcatacatacagactttttttttttttgagatggagtctcactctgttgccaggctggagtgcagtggcgcgatcttggctcactgcaacctccgcctcccgggttcaagcgatcctcctgcctcagtctcccaattagctgggaccataggcatgtaccatcacacccggctaattaaaaaaaaattttgtttacaagtagggccttgctagattgtccaggctggtcttgaactcctggcctcaagcaatcctcccaccttgatttctcaacgcactgggattacaagtgtgagccactgcacccagttacctgccacctgctattgcatgtagataaatttctaaatagaaagaaaggaatagatgtaatcagttttcttatcaagaaggaagaatattctgttttagctgagatagtgttgatgaggaacgggattgcttcctctgtggaaaaaggcatgatgacagaggacccccaaaattgattcattgtggagacattggcctttccaattgtcttatgacagtaagccaattttatccctagtaggagtcctcaaggtaaaaggcacagagtatagaacattggtctcattttatcaggcaagtttaacatacaacaatgttgctcaagggacagtggaggaggattgattttctcctgagtgatgctagcctattaagaagtgggcactctttgaaattttggtaatagtaattgaaagcttaacatttttttctgagcttatttcatactatatagtatttccaggagcagagaaagccatatgaaaataaaaggcattgaacaatttttaaaatgtattcattcgatcaaaatattattaaggacttatttgtatcaggcactttgctggattgaaggtggataatttattctcaaagagctaaccgtctcttcactaaatataacaacgctatagaatgagattttttaaaaaaacagcattgcaagtatgtagagaatattatgggagcccagagaagcagcacatgccatgccacagactggcgtaggaaggattcctggaggagggcgttcctgagcctgcctcaaaataggcagaagaatcagtgttaccaagagggaagggatcaggagaccactagaggggacaagatgagcaaaatgtgtgcagttaagacactgcacagtttatttgggagaactggtgaaaacctgttgtgtctcggagagaaaaggagatggtggtagataaggctaaaaaggtgggcagagaagcaattagatatcagctcctgtgccagggaaagagtttggattttatcttttagagtttaaagagattcttaacttttctgggtcataaacccatttgagaatgtgataaaaactgtcaaccttctctccataaaaatgtacctttataaacgcacttaaaattttaaatattatctgaggagtttatagaagccctgagcctgtctatccatggacttccccttgggaaccagctatttcagacaaattcttacgtacctcattgtcctataagttagcatggagagggtttagtgatattcatagataggagcttcacatttagttatcaataacaattatcaaacgtggggagcagccaggctcttcattcataatgaaaatagtgatcatggctaatgctgacagagtctcaccatgtgtccagcgccatgctgagtgattatgtatattaacttgtttgtttttgttttttgttaacttgtataacaagctcacaacaattctgtaaagtagctattcttatttttccaatatctcaggtgaaaaaacataagcacaaggtattatttacagctagcaaggtacagagatggcatatacccagcattctggtcacacaggcactgtttcatgcccttaattgctacattatcctctccctgagaaaaacaaattgaagcagtttctaatgacaagagcctagaccaattggccatagatacaactcagtatgcagatcttacgttgtgttcattgaacttacatcttagatgtacagattgctgcccttgaaagcactagttcattgtggctacattcatgacagaactttgaataggttaaatgtggctttaagattattagcagcaacacttaatgctgcatgtcatccaggttgtcttaaagaattttatttctaaagctaaatagtgtataatttttaaaaaattatccttaacatacacttcatttaaaacaatttatgaaaccaactctaactagaacttagcataaaatttgatgtgcaacattaataaatcgatgctcaaaatttcattctctgttccttttatctacaatgctttttacttggaaatgtgcatttataccccaaaaaagaagctacatgaacatctcaatagatgtagaaaaagcatttaacaaaattcagcatctgttcatgttaaaaactcttaaaaaataagtatagaagtgaaaaacaagtttattgcaacagggctcttctagaaaggaactagacacaaagaaagggaagcattcataactgaaatggaactaggagactgtatatcatatttaattagagcatagatatttcataagcgagtgtatgaagaagcaacatggcgtcacaatccggtggtttgttagggctggaaattttaaattacttcatacaagtttaggtgttctggggcttctgactctgagtgggaagtttgaggcttgactgtggtggtatactgactgccaatcctgaggaactctgtcagtctcagtgtcttcatttgtaagactgaaatgattcacattaatttcatgaaaattaaaatgtttagggccatgcatataaaattactattgtgttttgcttttgtttggtttctttactttgggcttctagtggaaatagttgcattaatcatgctccttatttcatggcacgttatcatcactgatcactttgtttcattgtttggtttggatttgctgattattttttctgtcgttctctagatttcctttacattacataggaaaccatcgtaatatatcattttatctttttgtttgtatgtgatttgcaaaatatattttgtttttatgactttttaaagatatttttatacataccaaaccattctactataaagacacatgcacatgtatgtttattgcggcactgttcacaatagcaaagacttggaaacaacccaaatgctcatcaatgacagactggatcaagaaaatgtggcacatatacaccatggaatactatgcagccataaaaaaggatgagttcatgtcctttgcaaggacgtggatgacgctggaaaccatcattctcagcaaactaacacaagaacagaaaacaaaacaccgcatgttctcactcctaagtgggagttgaacaatgagaacacatggacacagagaggggaacatcacacactggggcttgtcagggggtggggcgctaggagtgggagagcattaggagaaatacctaatgtagatgacgggttgatgggtgccccaaaccaccatggcacatgtatacctatgtagcaaacctgcacatgtatcctataacttaaagtataatttaaaaaccgtaactacagtgccattattacacctaaataaagttaaaaatcattacttaatatggtaaaatgtagtgtttatgttttctccattgtttgttatgttttctccatagtttgaaaacatagtttattatgttttctccatagtttgttatttgaatagggatccaaacaacatccacacgttgcaattggctatttctttaaaatccgttttaatctataagtctctctgtctccattttttcttcttctccttctttgtcttattcttctttttctcctttaactttttttttgaaaaaacattgtcatttgttctatggagttttccaaaatctgaactgattttatggcactatgtcacttaataatttctgtttcctctgtatctgtgtaattaattctaaagctgtaatcagaacagttaaaaaatgtctgtgggggaagttctgatataggtggtgatatggtttggctctgtgtccccaccattcaatctcaccttgaattgaaataatcccatgtctcgagggtgggaccaggtggatataattgaatcatgggggcagttaatgctgttctcctaatagtgagtgagtttttacaagatctgatagttttataagtggctttttctcctttgcgtggcacttctccttcttgccaccatgtgaaggatgtttgcttccacttccaccatgattgtaagttttctgaggcctaactggccatgtggaactgtgagtcaactaaacctgtttcctttataaattacccagtctcggacggttctttatagcagcatgagaatggactaacatgataaattggtcccaggagtggggcgctgctgtaaagatacctgaaaatgtggaagcaactttagaactgggtaataggcagaggttggaacagtttggagggctcaggagaagacaggaaaatgtgggaaagtttggagctccctagagacttattggatggcgttgaccaaaatgctgataatgatatggaccatgaaatccaggctgcggtggtctcagatggagatgaagaacttgtaggcagatataagaattgttaacgtgtacccctgtaggaaacaactttattagctcgagtgcagtagttatgtgcaggtccttttgcctttacttttacggattctattcatttccaaagttaggtcagtacctttcttaccccatacaatgaggttgttccatatatttgtaatacaattagattttcttgtcacagtctacattctttgcggagatcctccaactttctaaatgattttttaaaatttgaatacaataacgttcactctgtgttgtgtaaagccctataggttttgataaataagaatcctataatatcatgtagccaccaaataccatgaagtatagtttcaagaccctaaaaatccctcgagctttgcatattcattgctccccacttttcccatacaccagggagactgatcgttttagtcttcttatagtttttctttatccagaatgttatataattgaaataatacagtatgtagtctttttagaatagcttgttttgtttagtgatgtaaatttaagcttcattcatgtcttcatgtcttttctgacgatctttttttacttagcattatatttttaagatctatctatgttgttatgtctgcattgattcttttccttttaatagcactatgtgatggacaactagtacatttgcccatccactctctgatggatagcacattgcttcaaaatcttagtgtcccaacccaactcagctctactaccacaaataatgtaataaacagactcacatatatgcccttaaggacctgtgtatttctttgggatatatacctaggaaggaaattgttagaacataagacatgtccttgttttatttgactagtgtcagattgctatctggaatggtcttagcaggccagcaacatggttttttttttttttaatttgtgttttagaattagccccatttccccaccaacatttcatattatcaaaatttctggatataagtatataggaatcatgtggtaactcactgtatttatttaaatttctataattactaatgagtctgaacacctcttcctgtgggtactagattttacccatatttatatgtagatgatgtattttttaaactgatttgtagttgttccttgtatattttaaatatgaatatcatgtcagtttttaacattacagaataccttttctaacaccatcatcggtctgttagctttgttcatgatgccctttgttgaacagatttatcagtttaatctttggcttgttggatgacggtacgatttacaaatattctgaaaaatgagagagaaatagggtaggctagagtggggaacaggagtttctgtttggctgtattaggttagagatgcattgaaccttcaggtagaattcttaagcaagtagtcagacatgtgaatctggcataaagatgaggttttgttagtatcaacctttaaaattgtttttttgtttcttgaaggttttcttcttttttttaaactggactttgttgtttaaagctattgacaaaatttctacttaataaattggagctgggagcagtggctcatgcctgtaataccagcactttgggaggccgaggggggcagatcaactgaggtcaggagtttgagaccagcctggccaacatggtgaaaccccatctctacaataaatacaaaaattagctgggcatggtggcatgcacctgtattcctagctactcaggaggctgaggcaggagaattgcttgaacccaggaggcagaggttgcagtgagccgaaatcgcgccactgtactctagtctgggcaacagagtgagactccatctcaaaaaacaaaaaaaaaaaaaaggaaaagaaaaagaaaagaaattgcagaaggcactttgaattgcatcatagtggatttttttattttgctacatatataatttttatcatattttttatcccaaatatttaatcaatatatagtcacggttcccaaagaaatgtgcaattccaaccctatgtgtcctcttcccctctggcccccttagcttgtttcaagggttctctggatatatttcatagaacattttactgttccctttgtaaatggtgatatttctccattttacatttagattctaagaaacagttcaaggtgactctcatatttaaattgaatatggaaatagatatttttgatgcaaatttataatatgttcatgggattaagttatcaagcattgaatattatattttcaagaccatcttccttgagaagaaaatgtttatagacctgtaggtgcgtatccttttttacatggtaaaaaatacttcagaattattgttaataaaaataatactttaattgatgaggtttttttcaatagaaataggacactttcatacaattcttgtcaggtctttgatgttagaagttgatctttgacaactgggcttgaaaacaacagaaaaaatatttgaatcaaacattaatagtaatatacttttttttaaggttcacaaagataattaattttagattcctctcacactatatttcttttttacaggatttactttccgttttcatataaaaaattattcatattatacacaattgtatatctgcaatttgactttttataaattgtaaccaattcattatcacatgtatgtacttttggttgttgtaaataatcctaaaatcctaattaggatataaaattattaatacatatttacaatttatatcctaaactatatttatagtttgatttttattatgtaggaagaaagtatattgtcttagctatttaagtttgtagaggtaacattgtctccaaaaggggatgtgaccatcctagaaaagctaaaataaagaaaatcttccttttaggtacagagaaagaaaaaaacaacaacaaaacaaaaatgccttgtattgctttgctgaggactcataaaaatgactggtggtgctttcaggcatcattcatcaggtttacattttagagaaagaaaaaatctcattatccactccgtactcatttaacttttaagtgcttagaagatttgtcataacctagactcaagctctgaaatggtaaatcttgacacatctcaattttagcaactcatcttagcagtgctgaaacgctgagtgctcataggtacaggagctttatattctattttgccctaattctttcacattttttatacatcactcctaactttataatgttgttagcttttacaccttcctttattttaaaactggattagtctaaaagtttcctattcagtaagaagtaccaaatgaactattgagcacgatgcataagcattaacacatttaatcgtggagggcaagtgaagagtacaattcaaatgggtcaagagaactagatttctatgaggtcattaagcattctatttaccttaattttgtgctcttatgacactgccctttgccataccatgcagacttcttatgcagcagaaactgtagaagtttaggctaggggagaagggactgagaacctatatgtttttgttcattagtatctgaaaagtgatgagttaaaatgtgtggctacttatcttaaaagtgtatatatatatatatatcatacatatcattcttttacttgcaaaagtacattatttatgataacatttagatactaactttcctcatttgaggaagtagtagtaaaatgtgtggctacttatcttaaaagtgtatatatattatatatatatatgtcatacatatcattcttttacttgcaaaagtacattatttatgataacgtttggatactaactttcctcgtttgaggaagtagcagcactctttcccttcagaatacttttttttataacttgcttaaattgaatgaggtcatttattaatactcaaagctaataaggcatcatcctgtaactttcagaagacgaatataagtagaaactatttaataggggaaaaactgcctggtttttaaaactttccttttatactttgtaatgtcagattttttttcttaacaaaaagaaagttggataagacaactccttcaaaatgaatcctaatttatctctattggatgcatgtgcaaacctagctcctgttccaccagtgtccaaaggttataaaaaattgaacagctaatttttaagtagtatttaaaattcattgagaatgtaaaatgaccacaaaattatatttttccgataacttcttatatccactgtgatgtccaacttagagtcagaatgtaagggttcacattttaatttctacttggacagtatgcccaaactctgtactgtgaatgtatgtcatttatggagatgctaggatgtaaaagcattcaaattacggtgcttttaagacaaacagcaatttggtattattggttattctttctcctacactaggcactatacccatttatttggtctatgttttcacaacagccttgagattttcggaaagtgacctaacaatcctgtatagactggtcttaggatggggaccaaggctgaacctgggtaatatggacagaggtgaatttgtagtaatgtgtttcatgtaaaagcaatgcatacaagttttgacccatcttctgctttttgttttttttctattggcttgtctggcaaaattagagaataattaaaggtgaaaaacaaagcctccttcctcatacagcatacctgtttaaaaatggaagactataaaactaatttcactcatcataacaagaaatatatctatgatagtaattgaaatagtgtgcagcttgatctctcattaatactttggtaatttataagaaaataacagtatcaagaaaatgtgaggtccatattatcttatgttttttcactgcttcccctcccaaaaacataccatattagaagtcaaattataatcagagggctgatggtcaagaaggaattagcgtgataggagtgagaggaaaccgatgtatgatagtatcagattttaggaaaattgatgtgctcattctcatgctggggatattcctcccagtgggatgggaatgcttgaagatgagagtcttctgtctactcccctttttatcctcctccacatgagggttgattttgctgatgtggctaaaatacttgaagtcagaggcaccacgaagtctagttctctacccaaggttacattaatagttagagacaagatgtggctggatggcaaatgcctttcaaggtatgtttataaccagggaatcctagaattattctgcccatttcaggtcacattttcctttcaggcatgtacaatatgaaaatcttaattcagcaatgaggccattggccttgttttaacctgcacattgtaagaatatgggttatataaagcggcagaggaatgatcgtacctggactgctaaaatctccgtattcagagggtaacttcacaaaatttggcaaaaataattgaagagcagtggatgacatatttaattatctctttctctcaatgaatttgttgatgagtttcagtctatttcactctggggggtagaactaccaaataagacattttgattaaaatataaaaaataaaattcaacaagtctgtaaatgactatttcagtgtctctagcaatgtgtaaaggagcaggactgtatttctcaatgaaggtaactttttagtatcaaagttagaatttgactgttttgagattctgcattgagatgtgaagttatctgttaattattttacttgaaagtgtattttaaaaggaagatgagctgtgtccccacccaaacctcaacttgaattgtgtctcccagaattcccacatgaggggtaattgaatcatggggaccggtctttctagtgctattctcgtgataatgaataaatctcacgagatctgatgagtttctcacgggtttccacttttgcttcttcctcattttctcttgccactgccatgtaagaagtgccttttgcctcctaccatgattctgaggcctccccagccatgtggaactgtaagtccaattaaacctctttttttccccagtcttgggtatgtcttcatcagcagcatgaaaatggactaatacagaggaaatatacctttacctgtgtttcttacttggaggaaagtgtcagtcattttcaaaattttgaattatttaaaattaggtcagtgatgtcacagtaagttaacttatattgagtaaagttgattttcaatgagaaacagttatggtgttaggtgacaaaaaagatttctacaccaaaacaaacccaaccatattctggcctaaaacttacaaataaatacttcttggaaatttaagccaaccattttatgttatggaaaaatcttttgaccttctcagtaagatttaacaaaagttttttttttgtttgtttttaatgacagagtacaggattagtataggttaattaatttgttaatttattgtttgttttatttatttattttttgagatgtagtttcacttttgtttttcaggctggagtgcagtggtgccatctcggctcactgcaacctccccctccccagttcaagcaattctcctgcctcagcctgccgagtaactgggattacagatgctccccaccatgcctagctaatttttgtacttttagtagagacggggctcaccatgttggccaggctggtcttgaactcctgacctcaagtgatccgcctgccttggcctcccaaaattctgggattacaggcgtgagccactgcgcctgaccagtatagattaatttataatttatggtaacaggtttgtaagtttgtttatcaagaagtaatggctagctctgagcttgttgtcgcaacactcttgtactaacggaggcccattatttcagggttcttcttgtttctaacactgacacatagtctctgtctttacttacttatttcttaatttctcagttatattttgagctactctaaggattgagactaatcatgttctgttttctgtattcctaatccttgaatatctttctaaatccttatttacttgtattcaaacttttacagttccataccaaacattcccttttatagaatatgacattaactttgggaaaaaaaggccagacgcggaggctcatgcctgtaatcctaacacttttggaggccaaggcgggcggatcacctaaggtcaggagttcgagaccagcctggccaggagttcaagaccagcctggccaacatggtgaaaccgccatctctatgaaaaatacaaaaattagccaagtgtggtggtgggcgcctgtaatcccagctactctagaggctgaggcaggagaatcacttgaacccgggacatggaggttgcagggagctgagatcgtgccactgtactccaccctgggggacagagccagactccatctcaaaaaaaaaaaggaaaaatgtactcctctttttagaataaactaataatattggagagaacaaagctactaaatatattaatacttcatggcaacatgaaaccattacctgcatggttacaagtcaaatgcatggaatgaaagcaaagtttttcatcagtcagtggttgtgactcttacactagctttcaactctttcctgttaaccctttgttgtaatcccctattctctgtttgcatatttttaatgcctccctttttgctcgttcaaattccaaagaagaatatcttgtgtttacatgacaactctatgctgttgaacagctcagtgggatacttttgtccccacagccatttaggcacctaaagtgttttaggctctattattatcaacatagtttccagagttagccagggttcatgtctatttcacacagttaaaaaaaaaaaaaaaaggagaaatgaaggcatgcacatggaaggctgagaagcagtgtgcatcgcacctcgcattggctactacgggccactgctggggagtctaggatgtaccctagcctcctttgccacgaagctgtattaatattctctagcagataccacatttggcagagtaactacaactggggctactacttggttgagtttgtagtacttcgtcattctctcacatctttctgatttttgttgctgaccagagtaaagcattaaatgaggatgtgagggagtcactctttaagagtgactctgatctctttctctcctggattccatgttatctttaaattatcttcttaatgaggaggagagagaggagtgacagtttcagatgcttctacctggccttcctcactatagtagcttttatcccacaggccaaggaaccagtgtggaaattctgccaactattgagtatgttcattctaaccatatagtcaagcaccagatagttcatggactgagtgggctcactgtgagccagactaggtcacggactccgtttattactctccctaccccatctacccccactttgacagtgggccacaatgatgcttcaggtccctgggtcttaatatcaactcaggttcttattcagcagtgatggttcatctccatgcaatgtatggatgtcctcctttgcccagtggttaccccagaggttcccatggtcacctcagtaaacacttgtggatctctttagggaaggactagggaatcatcagttatataaatgagtggacagagtccttcctcctgagaactcatcctctctttcagtttatactgaaatatataccattgtttatacttctgagaactggcttatggccagaaatggggcaaaaggtcatgaatttattaactgatttattttaatcctataaatgaagcaatatttctgttgcaatccatttatcttgtctcctggaactttgtgtcctagtaaccatctccaaagttttttgcggttaaggtgcccctggctgtaactagtcttgtcactagttctgataattgagcctaccctgcttttgacagttagtggccatcatctggtctgttatggtaggatcctgtcatctcagttgctctcctggagcccagttctgtgtagcatcttctaccatttgcatcttttcttaccagccttagtctatagaggacagcttccacaggacttcttttggatgctggtatccctttcactagctcattccttctcacttttgtcctccagcttctcatagaacagagttaactgatggactttggcttcgggtggcatatctactctagcgtgctcacttctctgagcctttggatcccttccatccttcgccatttgccattgaaattctagaaatttaaatttcatttacagtaaaccatcacttcttcccaactttccagagccaactggagttttattaccactgtctactagagtcctctgtagggtggtacattctctgtcatgccaaagtgcttcattatccataaactagcccttatcttaccttaggtttcaccctgtttgatccagcatctttggggaccagtccttagctctattggaatgtagtcccttcttccctcagcagtgccagccctttcatggctgggttatgttggaccttcacctttgttattgaactggtggccaggaggggataagaggggtaaatctggaagggtgacatgttcccttataaggcagaggttctaaataatctcaaggagaaggggagtgctagctgttaactggaaagaaagagccacttctgaaatctgtagatttcagatgaatcaagcaatgcaaagcttttttttatgtatttatttatttttattatactttaagttttagggtacatgtgcacaatgtgcaggtttgttacatatgtatacatgtgccatgttgtgtgctgtacccattaactcatcatttagcattaggtgtatctcctaatgctatccctcccccctccccccaccccacaacagtccccggtgtgtgacattccctttcctgtgtccatgtgttctcattgtgtatatacccaaaagattataaatcatgcttctataaagacacatgcacacgtatgtttattgcggcactgttcacaatagcaaagacttggaaccaaccaaaatgttcaacaatgatagactggattaagaaaatgtggcacatttacaccgtggaatactatgcagccataaaaaatgatgagttcatgtcctttgtagggacatggatgaagctggaaaccatcattctctgcaaagttttttgagttcttgaactcagattttcctattctgtttttctgggtcctactccttcccagttagttccctgacctcgatgtagcagacttgggaaaaagaatatgctgagaattcaaccttcaagggagctctgctacctataatgaagtcctagacctaatcctcagcttttgataccctgcaggagatgggttcctttacagacttccaaggacgttcactggatttagtgccattcatacctactcattggagttctctatcatgtgtgccttacaacagcacatgtatagtgctatacaatgaactttcattcatatcgcatgttgtgacaactgctgccttttgaattgatgcaagtgcttgttctcatattaaaaccatctcagttattggccatgacaaatattacctcaattttgaaaattaaggaattgagacacagagagattaatttaactgtccaaagtcacacagccaataagtagcagaatagaacttgttcccaggtagccaaatgccagagtctatgctgattctcactacaatgatgctgattctcttggtgctgtttgatgccaaccaagtatgaattgaaacttaaatatagcaactgaaatcaaatgccagtattttatgataaaacagacatctggatgaaccttaatatgattatattaattttattgagataaacagctaaatgaaaaagcagcatttcattatttttataaagggtgtattgataactcgtgagttgaaaacatggcagcagattaaagattcctgtttttcacattgtatggctttcagactgttcaccaggtgtataagcacatttcagaagaaatgtccagctaccgtgactgagctgctaaatgccaaatatttttaaataatgttactaattattacaataaagagttcccatgacctacttcttaattggccctgcaacaattactgatatctcatagagaaaaaaacacaagattttttcctgtcttactctatttgtccttaattttacttttttttctaaattgttagttgcctatgcatctgtgtgactattttcacttgccgttgtgtcatcagctggtattatagtgagccaaaattatccacatcttcttaagtatggaacagctacatcgtcatagaacttatagtgatggacagtcactaagtttgcgattgcgttaaatttgaatttggagaacgaaagaagagaggttattaaaatgccagggacacacaagagccggaccttttttaaaaaaaaaatctcaaaggcagtttcttatagatgactttagaaattaagccctaaaaacatccttggtgcactggtctttctaagtactggcattcagcaatgaaaatgcagtgcttttcttgtccatgtctagaggaaaaaagcactatcagttatttagaatctgatttataccttaagagagtggctgccactctctgtgatttcagggaagtcgggtatcaaggagcaattttcaaagaattgaaagccgatgcagggttatgaataaactctgagaggtttgaccttccctgtcaaacgataaggccataaatatgttggtaattctgctttgttgtgagcacctgttctttttcatcattgtggagtttctaggataccaaaaattgataactgtaaaactaaaatattttattgtattaaaaatactagaaaagtagacaatacagggtagagaacagttttttgcatgttccttttgaaatgtgtctggagttggaccatccaattttgaaaactttacaaggtccaatcaaattcagtataacagtatggtcatattttaccatttatttgaatgaagacagcataagtggtttttggacaggaacggagatagttaatgtataatatttttaatgcttttttccccagtatgccaaattcattatgacatgtggttcattcttgttcagatggaggctttgtcagcaatcacatacagtacagtgtgtttgagcattttcagtgctgttaagcgtaaagtgttctgttttaatgattatgtttccatcttcattaaataactgttgaggaacctttattctctgacttcactattacctttctcagactgatagcccaggagaaaacaaagataagcaggggaaaaaaaacagtccagataactcccagagaagaggagggaaaattggtcattttcttttattttagaaacaaaaataaataaataaaacttcttattttttacaattttaagagacccttaaactcttttgaacaaacacataaaaaaacaccaaaaatgatttttctgttttatggtggcctaaaaaagcagaaagagcacaaggaatgacaaggaaaaaaggcagtgggcatacaaagataaaatagtgcagacaaagccatctggagagggacagcaagagattgagagtgtgttagttatccattgctgtgtaacaaattgcccgaaaacttggtggcttaacacaacagtaaacatttattatctttcaaagcttctctgtgggtcaggaatttggtcttagctggacgttccaagcttagggtcttgtatagcttggttgtcctggtgtcaggcatcagattccatgtggctgacaagttggtaccagctggtggcagcgatgggtgtgaggttggattcctctcaatacggacctctctaaagggctgcttgagtgtcctcatgacataaggattggcttcccccagagcaagtaatcttcaatagcaagcaagagggcagctgtattttttttttaatgatctagcttcagaagttacaatacacccgcacttctgcagtgtcctgttggtcatacaggttagcttattcggtgcagggaatgcaagggcacaaataccaggaggcaaggttcactgggcgctgttttggagcttgattgccacagagaaatagggaagagagtggtagacaaacacagacacacagacctttatgaacaggagaggggagaagactgggtagttgagtcaagtccagggtgagggtgatcatgttctcctgaagtgcgcttggtttgtgacaagtgtaaaggccgcttaatatcagttgttaattctaacccaacttgtcacatctagtatgcttaattgtactctcattacaataatctttctagcatcaaaatggaaagcttagttgtattaaggcatatttttctcagaaatattaccacaattttaccttaaaggataaaaatctatatatttcccttccaacacacacacacacacacacacacacacacacaccccagtatcagtgcttttacatttctcatgtcaaagtatctgatatagaagaggtatcaaaataagaccactataacaatgaagattgtaatctacataacttgaaaggagtgtttattctgacatttttgcccaaacacagtaggttgtaggttatgaagtacttctcaagttgctttcagaagacaactgtatcccaacattcaagatccccaaaatgagaggcaggtacactgactttctaaaagtaaaagtaattaattgtgttacctgtgatttaatccgtttgttttctaaacataatgatagcagatgtttttggagcatttactctttggcaggcactattctaagggctttgcatttcaagccattaagttcccaaagcaacgtttttattctggttttgtagttaaagaaaatgaaacttagacatgatagaaagggattgaaatccatgaagtctttctctagcacctacaatactctgtctgtctgtctgtctgtctgtctgtctttctgtctgtctgtctatccatccatccgtctgagacagagtcttgctctgtcacccaggctggagtgcagtggcatgatctcgactcactgcaacctccgtctcctgggttcaagtgattctcctgtctcagcctcccaagtagctggaattacaggcacccgccaccatgcctggctaatttttgtatttttagtagagacaatgtttcgccatgttgaccaggctggtcccgaactcctgacctcaggtgatccacccgccttggcctcccaaagtgctgggattacaggcatgagccaccgtgcctggcttacagtactcttaatggtcacgctgcatgcagggtagattaacccaggcaagttcaaaagaaggattcactaacaatgacagtgatttcctcagactccatggacagaatctatagtatccccagacttctcaagagttagaaaaagaaaatggaatgctttctgaaacctgggagtgtttctcttgagggaaggggtcagcctggaggtaggtgggtctgatttactttttaaagggatcattttcaactgctggtttgggaacagactctagtgaggcaagaggagaccttattatggcaaagtgcacagggtggtaatgaatgagactgtgagatgtgataggaagtgataggaattctgaaactatttagaatagggtcaataagatttctttatgggttagatgtggggtatgggaaaagaagaaatcctttggcctaagcagttggaaagatggagtagctctcaactgagatcaaaagctgtgaatggggtgggtttgaggtaaaaggtcaagatatgtaaaataggcaattggacatgcaaaagcagagtttgggagagaagtctgagctagagatccaaatttgggattccacaacatctagatgattgagatcacaaagagtgtgaatatgggcatatgagggaggaggatcttgctgagagtaaggagtttagaccctccatcattgagagtttgaaaagaaggggaggagccagtgaaagacacatgggttaagaggaaaatcaaaagagtgtggtattctggaagcaaagtaaagataatttatcaaaaagagagaatgataacccattgcaaacactgctgataggtcaactcaaatgaaaactaatagttgaccattgaatttagcaacttggaggtcattggatttctcagtgaaagccagtttggaagagtgatgggggcaaaagcttatttggtatgactctaagacagtattaggtcgttcttgcaccactataaagaaatccctgagactgggtaatttataaaagaagaggtttaattggctctaggttctgcaggctatacaggaagcatagcagcatctgtttctggggaggcctcaggaagcttccaatcatggcagaaggtgaagggggagcaggtgcattacacagcaaaagcagaagcaagagagtggggggcggtgccacacacttttaaatgactagatctcacaagaactcactctcacaagaatagcatcaaggagatggtgctaaaccattcatgagaaatcgaccctcatgatccagtcacctcccaccaggccccacatccaatgttggagattacaattcaacacgagatttgggcagggacaaatatgaaaactatatcaaagacagaatagaggagaagaactggagacagtgaatttagacagtgctttctaggaatcttaatgtaaatgggaacaaataaatggggtagtaaggtggtagatggcagatgaagaaggtcaagagttgttatatggaaactactaagcttagtgttttccttttcataatatttattgtactcctactgtgtacgtaatactcccagctcctcaggaggctgaggcaggaggatcacttgagcccaggggtttgaggccagcctgatcaacgtagccagaacccatctcaaaattaaaaaaaaaaaaaatcaataagatctgcttctctccttgaggcatttatcttctggtaagggaattagacttgaaatagtgtgtgtggagagcagaaggtatgcaagtagcccagattacaagttcaacaaaggattctgagaaggatagtggattcggtggcatctgaactgagtgttgggacttgtaccatctgaatattaagcctacctgcttttcattaatattttctaagattgggggagaggagaagcaaaattgtcctgtttgttcttgctttatgatactggattttttttaaaaaaatgactattgtatctcagttttcttgttcatagcccagttattgattttgctttaaccattctttgtgaacttctggaaaacccaatagacatgttttgaaaacatgaataagtgtttcacacagacttatctgcatcctccgcatattcagtcaccaacacagaacagcgaaatgaatggagacataacatagtaaataaagagaatgggacattctattgaagatacatggatgaggtcaaagaagataggcattcactgacttattcattcatgtactgtatgagtatttattatttaggataaactttaggcaaggtcatgcagaagcttcacttggaaagtgaatatagggaacaaaaaggaagaatggggaaaaagcaagcaatgagataaatgggccagactggtttttaaagttagagcctagaaatacatgatgacatagtaaaaacaagtgggctttaaaatcacagcatacttgggttgagatatcacacctactgttactagttgagttatcctgaatgagttcatgactgccctgagtctacaatctttattttagcagtaattctaccacacaaggttgttacgagaattatagtgcccagcagaatatttgcaccaagcaaatactcaaaaattgtttcctcactgctatggtctgaatgtttgtgtctcccctcccccgtgcaaaactcctatattgaaatcctaaaccccaagtttggaaatggggtctttaggagatgattaggtcgtgagaatggaacccttgaatgggatgggtacgcttctcaaggaagcctgagagagactccttgccactttccccacgtgaggacagactgagaaggtgccatctgtaaaccagcaagcaggtgctaaccagacactgaatctgccagcatatggatcttgggcttcccagggtccagaaatttgagaagtaaatttatgttgtttataagctaccattttgtggtgttttattctagttgcccaaataaagtaagatactcatttttcttttcttttgtttgtgtggttttttttttgttttgttttgttttgttttgttttgtttgagacgaagtctcgcccttgttccccaggctggagggcaatggcgcgatctcggctcactgcaacttccgcctcccgggttcaagcaattctcttgcctcagcctcccgagtagctgggattacaggcgcctgccactaagcctggctaattttttttttttttttttgtatttttaatagagacagcgtttcaccatgttggccaggctggtcgcgaactcctgatgtcaggtgatctgcccgcctcagcctcccacagtgctgggattacaggcatgagccaccacgcctggacaagatactcatttttcgccccgttttttctttaactagatctttctcattatttcttccaggttacagagtttgatagtcatgctggttttcaaaataaataaatgcaaatttgttgtctttccctgcacactttcttcaggaacactaacaatatcccatgagcattattaacacgagtgaaaaaaatcacgagacacccaacattcagttaagcatgctgaacatcagccataccacattctcagctagcagaaacgctgcctggagtttgataatgaataggatcattccagtagttctccctacggttgaaccatctccccgcttatcctccattctcctgccagtcttaatgacttgtagcttctgagataacatcaaagcgaagtgcatggggattgatgaatagctcatctgacaaaagatggggggttcaggtagaagggaatgttagtgcttacagtaattgtgggaagctgattgtctattgaaggggactctctttggtagctcttttatagtaacaaagttggagcagttaataatacaggaagaaagttgaaatatgtattgcagtaacagcattccaatcaactcttttacaattatagaaaatgtgggaaatacgttagtatatttagaatctgaatgaaatattacttaaattattactatcactaaaaaaaagataacattgagttatcgcagtatttggctaaattcatgttgagaattccaaaaaataacttgaagaatttcacattgggtttagtgaccagatattaggcttcagaaggagttcttagaactttttttaaaatgatgaacaaagtaaaagaggtatgctcttatttaaaaattcatttactaaaaactagagcttctgtatgacaaattggagaaatgactctccttaagatatcttaatgtcggctgggcaccgtcgttcatgcctgtaatcccagcactttcagaggctgaggtgggcagatcacgaggtcaggagtttgagaccagcctgaccaacatggtgaaacgccgtctctactaaaaataaaaaaattatccaggcgcggtgctgggcgcctgtaaccccagctactcaggaggctggggcaagagaatcgcttgaacccgtggtgagggtggaggttacagtgagccaagatcgcaccactgccctccagcgtgggcgacagatcgagacgttgactcaaaaaaaaaaaaaaaaaggaaggtatcttaatgtttcatggaggtatagcattaaaatgtttttcttttcccttctttctgctaatattttacgttagtcttatgagggctaatcacacttatttttctttaaaaattactggagcaaagtggccaggtttttaaaaaaataaaaagcagaaaggaaagaaagtgtgggttcaaattaaacctggaggagctgataaatggagaaaagtaaatcaacatatataatatgagtgcttgaaatgctattcttggcacgttcaacgtgttatttcatcctgaaaataactcagggaggtaatattgtagtccgcattttacagaaacacataaaattacattttaagtgtatttcaagcactagtgacagggtcttcatgattattggtgtacagtttacttgtatccaattaagcaaacattatctagatcggggtgtccaattttttggcttccctgggccacattgcaagaagaataattgtcttgggccacacataaaatacactgacactaacatagctgatgagctttaaaaaaatagcaaaaatatctcacaatgttttaagaaactttacgaatttgtgttgggtgacattcaaagctgtcctgggctgcatttagcctgtgagccgcgggttgggcaagcttgatcttatcaaagaataatgggtctgtctcttgagtcctttcagttcacctggaccttccctcatctactcagatactgcgagaagatttttcaaagcatattgacaccttttcatcaatacgttttctttaaacaatgaaacaatcaggtatttatttgatacatatgttccttccactgtgctgtaagtccaatagaaaaaaaattagattcttgttcttcaaagaaagtttattctttttagggatacaacatgaaactatttgagggatgcaatacagtaccaaagtgctacattttgtagcataaataattaaaattgtagcattcaggaggaagtcatctttgctatttagaacacatagggagatttcattaaaaaagtaaagcttgcattttgctttgatgtttctctggattgaggatggagaaacagtatagaagcagacaggagagcatgggcatcctgatcagatgctatgttaagaaaagcatttatctaaagtaatttgaaaactctgagatcacactaactcaaaatatatctttcaatgcaacctgtcctgtttctgctgtcagtaacgcttacttctgggataaatattgtctctagaagtcatcatttaagatgtctatatcttttgaagaggccaaggttgggtttttctctgactggaataaaaggaaggcatgaagataagatatgatccattgtaaaaaaggcataaatgcagaggtgataacaaagcagagacatcagtgtcatgttttattttgtaatatccaatgtgaagcgattgataaggaaattagcctgtcattagagttatttactatctctaaatgtaggcatttcatacatgtttttgacttttgaataaacaaactaacttaactacattaaggttttcttttggataactgttgagtattgtcattaaccctttaatagtacagctagctcatgtcagaacacgtatgtgatttcagccagaggttattgactaacttctaaaacaaaaatcaaatggaagttattaagttcaaaacatattcttgaaatgttctgactatggaaatattaaaccaaaatatgctagttttgggtgttgtgtgaaaaatattattcccaatcaacattttcctaagtcgatttcatgaaatgaagcttccatgggaaattacgagatgatatttgagcagcagaggaaggttctgtggtgaagtaaattttggaaatacttattcaggtaaacagggtttgtgtttacttgtttttgctgcaagattgcctagaacatctaacatgctggcaaaaatcgtggtttccaagaggtgaattgacaaagcgatttttccaatctgtatttgaccctgggagtaatgttctatggaaagcactttagaaaatgttctaacatgatttgaaattctaaaagctatctgtagataacatattaatgctttttcaaagggaacacccctcaatttaatatatatacatgcaacattaatttgatacaggctatttcaaatgaacccaatacacttttattttgaattccacatttgtggaacagaatcaaagaaaatatataagacttccaactctgaggttttacaactacaagttcactggggagaccctttatcttgtgactactttcagctatgtgagcagtcacagtatgaaaatataccagcacaaaactctgttgtgtaggagaagtaaccttttttcctgctaaatataatgtagatacttctgtctacttcttttactcttctttcctgcaggctatttaatttcctgcagtgtttgttgataaatttttaaagtacctggaccagctaacaaaaaatgagctaccagagactggccttgtgtttaatccgtctacagcaatatttcattcatacagggtctaaccgtgtgccactaattgtggctgccattagcctcagagtgtaggttcagcattaacaacaacttgatgaatgcatggccactttataaactagcattggcagcttctccttgaattgtttacactaaatctaatgtgtttatgttctttttctgttcagtgctttctgaatgatcttgttaattggctgtatattttgcgatatccacactgaaatatcttagcacaaaacttggcatagttattggatttaaggatgttggtatgtaaacagaatttagatatctctctgatatttttctttcttttttttttttttttttttttgtagagacatggtttcactatgttgtctgggcttgtctccaactcctaggttcaagtgatccttccacctcagcctcctaaattgctgggattacagacatgagccaccatgccctgtcaatgtttggtatttttcaaaggcaaaatctagagtcagctttaatcttttctctcagttatgtcattgtcctttggaaagtggagttataatacaaaacaaagggacagcgatttctcaccccttcatatttgtgtgtattttgttctaccctgacatgacagtctagggaaattaatactgttacgctgtttgtctttcacatgatcgtaggtatgctttccagcacacataccaagcaacatctgtgttacctttccctaaattacaatttcatattattaaggttgttagatgtgttgcaataaccacaattggaaaagcaacctgactgtgattgatttttgttctttctttactatatagggctggctttgacttcaaagagttatcttagttcggaaaagaggccagagcaggaacctgtgaaatgattcatgggagaagatggaagtaaatgatgagttcatgtgcctctagtctccagtaatggcataaatccatagggaagttctttaatgtcagcgtgtatgcctgcctgtgtcaagtcacatataggctagcacatattatgaattaagaaatctggggaatgaacaaaaattcctttatacagttgttcattttcaaaagatgtcatatagacttgaagatacaggaggaaaatattgctctcatttaaccataaaaactgtatttgcatttttataaacacaaagaccattcacatatggctaagcacctttttggaacaagagaaaacatggttaattgattgtgggctaaggcctatctgtgacttctcaagtccacaaacgagtttattcccagactgaaaattttaaggcctgctgattctttaaaataatgaggaaggcaatgaatatatagcatgcttactactatgtcatttaaatcattggattttataacagccctcctctccctgggagaataaaacttagcatgtatatgtgctgtttcctttgcattatacgatacaagttgaagaatactctcttagggagttaatatcacaaattgaaaaacacttccttctttccttcgccattcttaacagaagtcacctaggagcaccaaacatgctaacgtattcagctaggcactgccaaaccattaagccggccacagacagaggaaagaaaatcatcaattaagagacaagaactaactgtaacacactgaaaataagatagctcaagaacacaggaattcctctttgataagtgatggagaagtcgcactctaacaacaggtctcattgtcagaaacaccgttatcagatgcagaagtacagagatctggacaaggtgtaccttcctttccttgttccactggtgctctcttgagccctccactctctgcccccaaaatgtccagaatgctacaggttacctataacccctctgaaattgctgtgttttctgatgggaaccctaagagtactgcccttcaacaggaaactgggtggcgatccacctacatgataagtcgtcaccaattcctgttccttatctgctgaagctaatgtaatgctaaggaaatccgaatttctaaaacatctgtctcatcaactccttttttttttttgagatggagcatcgctctgtcgcccaggctggagtgcaatggcacaatctcggctcactgcaacctctgcctcccgggttcaagcaattcttctgccacagcctcccgagtagcttggattacaggcacccaccaccatacccagctaattttttttttttttttagagacagggtttcaccatgttggccaggctggtcttgaactcctgacctcaggtgatctgcccgcctcagccttccaaaatgctgagattacaggcgtgagccactgcacctggcctcatcaactccttctattagaaagaaggttttgatacctctttgagcacttgttttaaaagtgtgctatgtttggcatctagggatggtcatttgtattatgtttagtatatctgtcttcagagagaattatttatataatggagaatggtaggaagaaacaaatctcaaatttgtgtggcaagctattcaatataaatcaacttggggcggggaggaattctatacaaaaggaataaaggcagctcttacctaaaagaaaataaaaacttttttaggaaaacaaacaagcaaacaaacaaaaaacgcaaggccaggtgtcgtggctcatgcctgcaatcccagcactttgggaggctgaggtgggtggatcacttgaggtcaggagttcgagaccagcctggccaatgtggtgaaaccccatctctactaaaaatataaaattagctgggtgtggtggtgcccgcctgtagtcctagctactcaggaggcaggagaattgcttgaaccctggcggcagaggttgcagtgagccaagattgcaacattgcactccagcctcggcaacagagtgagactccatcttaaaaaagaaaaaaaaaaaaaaagcagaatacattgtaatggctgctgagaagcagctgtctttgtgtgtttctctttgtgtggtacctttcatttaggataggtttcaaacccacagtcctattgctgtgagtttggtctctggaattggcaggtgtaggtaggaatcccttatctgtgtggtcctatgttaatctctgcaagcttcaattttctcatagttgaaacataattaacaataagatatcagatactttgtaaaattattgtaaggattaagtcgggtgaaggttcctaggattattcagcacatattgcaaacatttttttgtgaggattaagtatgataagccgtgtgagggttgtagacgcatcctgcccaggtcttcagtgcacattaacattccttctctcttccccttcttaatgatcatttcttgtctccttcagggaaagcacaggttgcatgtagacactggaatggagggtgattggtgtggccttattcctgttggacagccttgtatgcaggttacaaccacaggcctcaagtggaacctcagtaagtagaaccttttcataaaggaatgatttttttttttctttttttctctgtttctttctttcttgctttctttctttttttttaatgtctctgtggtctatacctaggaggaattgctgggtcatatgataactctatgtttaacctattgaggaactgccagattaccttccagtgtacctgaaccattttacatttctatgtgcagtgtaagagtgttccagtttccccacattctcaacacttgttattatctgttttctggcttatagttatcctagagcatgtgaaggtggcatcttatgggggtttgatttgcatttctctgatgactaattatgtcgagcatcttttcttgtacttatggaacattcatatatcttcattggagaaatgtctattcagctcttttacccatattttaattggctatttttacattgagttgtaagagtcctttatgtattttagatacaagtcctttacccaggtgtgtgacttgcaaaaattttttagcccttagcatatattttcattttctgaaatttaattaactaaattaacaaatgttaattaagtctatgttttttcttttatggatcatatttttgatgtcataccaaagaactctttgccccaccgtcttcacgattttgtatatttgaaaaacctactttactttgctagagaagcagcaaattattttcgtagtcaaatctttaacataagatttgctgctcttattaaattttaaaatgttttccagtaattgtgaactgtattaggtcctactagtactaaaactatctgagttaaaaatattaaaaagtaagggggtcctgttcatgagataaatgctgattccaaaaggaaccatcagtcgttgtgaaatgaatcaactctagcctttctaaggatagtaataatttaatcaaagagttgtgattgaatgtcaaagggatcatctcctaattgaccaatacggcaaagctgtacaagtaaaatatggaactgtatcgttcttttctaacaagtaaagcacttagattcccacaagaaaataaatttttttccaagaaataaatattttgaaacaaaaagacctgtaaaaagacctttctatgagccactgcagaaacaattaggaaaaactagagatattttgaaacaaatgtttagagagctcatcagaatttgaaaggactgtgagaacacatctcctccagtgcacagaaatatgtgacaggctttgaagctgtttagctgaaattgacctgagctcccattggaagcttttttgaaaacattctggccccaaacaactgttttattttttctagttctcattatttccaagggcacccaatctagacagtgatgaacttcctgctggatctaggagcgatcacacttttcagggctggcagcaagacaaaggagcactgagcaaagaggaccgttggcactaggagcaggtgccccagcttcctttatcttatagtaataaaaaagagtcatatgttagacatgattcttctgttatctttagaatgtcctttgatcctatacttcccacagtagtatgcacattgtattagtccatgctcacattgctgtaaagaactacctgagactgggtaatttatgaagaaaagaggtttaactgactcacagttatgcaggcttaccaggaagcatgaccaggaggcctcaggaaacttacagtcatggtgggaggtgaaagggaagcaggcaccttcttcacatggcagcaagagagaatgagagcgatgggggacgtgccacagacttttaaaccatcaaatctcatgagaagtcagtcactaccacgagaacagcaagggggaagcccactcccatgattccgtcacctcccaccaggttcctccaccaacaattgggaattacatacaattcaacatgcaatttgggtggggacctggagtcaaatcgtatcacacatcctaattctgtgtaaggctttctctggtaagggggccttcagcatgatgagggcagggctcttaaccttcctgagataacttttgatccggcctgcatgtaatatgccattacttatttatatagttacacatcactttgacttttgaagtaattattttttctaaacttcataaaaataaaaaaaaaacttcatggcatatgcaaagcaataaagttgaaatacaaagtgtttcatcaattacctgttgtaaaagcgctaattcatggggtcttctgataggtaatattgcctcattaaaagttaataaaaataaatgtgacatcatgttgacttgaagaaaagtgggtagatttcattcacagagagggtccctgccttcctcagtgctgttgtctgtgaaagagccctgaggtcagggttattttgtcagtcatggctacaaagggacagggtgaaggtgggcttgcagaaagagaaagaatatgcagacacttagtcaggggcagctcacttcttgggttaatgggagtaagcaagtttttgtgaagaaacttgtcaaggtcctcatgtgcggccccgtggcttgatctctacctatctccacccactctaagtacatgatgccacaagttctaaaagtagttggatttatctgttaccagttcgcaatatttcacatgccattctaacgtttaaaaaaaaaaaattgtgtgactgatacctaggtaccgatcacccaggagtgaaacgtttcaaatattactgaagctgcctatgtttacagtcttttatttcatagcaatatgctatgaatattctttgacttgtgtcttgtacaagagtttctctaggatatatacagttggcagtaaaatagctgtgtcatagataatcacatcttcacctttgtgagatacaccatattgctctacacagtgattgtacccatgtgtattcagcccaggaatacatattaagttcccctgctccatatcgtcaacaattcttgctattaccaaacttaatcatttttgtcagcctgatgagtgtaaatgatatgtttttgtggtctctgctgataaggataagcatctttttgtagttattattcatgctggtttcttcttctgtgaattgctactttcttttgcctatttttccattgggatgttaattcttagaagttctgaagcctctttttcctggccgtactttggcttttcaatttgtttatggtgtttttatatgaacagagtttattgagttaaatgcagtcaaaatttatcagtttagtcattttcgtgtaagttatctttctattccccatggtcataaagatactctcatttaagtttcgtgtttaggtcttttctttcacctgaagttgatttttgtatatgatgtaaggatctagttttttaaagataatgaattgccctaacatcatttattaatcctttctccagtgatttgcagtgtagcacaggtgttcatatgtatgggtatgtttcttggatctgttttgttccattggcttacatacctgttcctgtgctggagccacgctgccttcattaccatagctttataataaatattgaaatgtgctaagttgagtcctcagaccttgttcttcaaaattgtcactctattcctggcattttgctcatttgtttgttcgagacggagtgtctcactgtcgcctgggctggagtgcaatggtgcaatttcggctcactgcaacctccgcctcctgggttcaagtgattctcctgcctcggcctcctgagtaactgggattacagacgactgccaccacacccagctaatttttgttttgttttgttttgtttgcattcttagtagagacagggtttcaccaggttggccaggcttgtctccaactcctgactttgtgattcacccacctcggcctcccaaagtgctgggattacaggcatgagtcaccacaccggcctgctcttctttataaattttagaagtaacttgacaagtgcctctctcacacaattctattataatttttgctgcaattacatttaatgtctagattaatttgggaagactcaaaaaattggggaaggaaatttctacatgaaattgagtcttcccatccacaaatttagtttagctttctatttacttagaacttttaaattcctttcaataattttataactttctctataaacatcctatgcatttttataaggtttatttctataaaccctatattttgtgtcctagtataaattatactttaaaaaattacattttctgttggtgatatatagacatataattcatttttgtctattttaatgttaacatattgatgaacattaattatatctgaaaacgtgactgtacactcacttggttttctatacacaatcgtatttctgttaataatcaagttttcttctgcagtctgtaacaaatagaattaagttactataatggactgaaatggtggctttaaaaaaaaagcctttttgttggtttcctcatgtagcaaagtgcagaggtaagtacctacagggcaaggtttctattatttcctcagcctttgcctgaaaatctaagatgtcttttgcaactccagctgtattgtgcccagtaggcatcagaagagaggaaagggaagggagcaggaaggatctgtaacgggaatcagagacatcagggattcccggcattctcagaaacccttcctgtgtctcatcttttgcctcagtggccagaattgtatcacatagccaccctagcttcaaggaaggctacgtgtgcaattttgaatccaactacattgtcactccaaataaaactgaggttccatcagtagggaagaagagaatgactaggagtctgctcttctgtcaaaaaatgcctttgcttcattcatcatcttgaacattttatctatgtatatcttaaaaaatttattttagttttctttcagccatattcatatggattgctgttgtttctgttgaaaaaatctacaatcaatgaaattagttctgatttgtttataatctgtcacgttttctagaccttaagttttgctttgatattctaaagttttacaacaatatgtttgcatgtaacgtttcttttgttctagttgctttttattcattctgataattggtatagttcatcaattctgaaaattcttagccgtttatcttcttcgattgcttcccctccatttttttctattcttttctccttgaactgttagtaaacatattaggcctcatcatcccttttccttgtttattctttgtgcattctatgtttgtttgtttgtttgttttcatctttcttttcactgtttctgtctttggctgtttctaatctgccatttaatgattgtgttttgaatttcatagattttatttttcactcttttttatctcaaaaaatttaagatcacgtcttgtttgttgccagtattttaattatatatttacttttttaaatatgtaagcagatttttaaaatatcagaaattgagatgaattatttaatctattagattgttaaaaatcataatttaattgataggagtttttttagatatttaaaaattggggcctattataatacatggtatcttatatttggtggaatacaatatggtatttgagcattctagtttcttcatctcttttttgacctaattctgctattttccttttttttattttttgagaaggagtctcaaattttctgtttccaattacttttaatgtttcttttaggttcagaggtacatgtgcaggtttgctatataggtatattgcatgtcacaggggttttatatacagattattttagcacccaggtaataagcatagtatccaataggtaatttttcagtccttaccctgcaccctcaactagacattggcatctgttgttcccttctttgtgtctatgtgaactcaacatttcacttccacttataagtgagaacatgtagtatttggttttctgtttttgtgttagttcacttaggataatggccaccagctccatctatgttgctgcaaacgcatgatcttgttctttttatggctgtgtgatattccatggtgtatatgtaccacattttatttatccagtctaccgttgatgaggatttcagttgattcggtgtctttgctattgtggctagtgctgtgatggacatacatgtacatgttctttatggtagaatgatttctatttctttggatatatacccaataatgggattgctgggtcaaatggtaattctgctttgagttctttgaaaaatcgctaaactgctctccaccatggctgaactaatttccattcccaccagcagtatatgtgttccttttctcttcagcctcaccagcatctattaattttttgcctttttgataatactgctatttttaaatatttcttttattctcactcatgatagacactttatcctgtgttttatatatgtggttgtctttttttttcctgtggaaatatgtagaaggttaggttgagcatgttctttgacatgagattttaaggtgcttctgccagtgccctgaggtataaccaatcctggaatacttagctaccttggtataagattttcctgaagacgctttcagtgttaattaaaaccacaaggaattgaggtgtcttttttagtttttgcctctgtgaaagcccaggctgatagagagatgtttccttgttccgaaccttttctggcagaccagttatttcctagttgctatggtctgaaggtttatgcctccactcccaatttgtatgttgaaacttaatcatcaatgtgatattatcaggaggaggagacattgggaggtgagtagatcatgaaccctcgtgaatgggattaatgcccttataaaagaggcctgagagagacacttgcctcttccaccactcagtaagaaggtaccatctataaaccaggcaatggatctggagttccagatgccaaatccgtggtaccttgatcttgcagttctccacctccagaactgtgagcaataaatttgtgatgtttgtaagctatctagtttatggtattttattagagtaacccaaacagactaagacacaagtctacccttctgttaaagacgtagcagtgaatttatatagaacctcagtcctaactctactttatcgaggcccaacatgttgactcttgattgacatgtatctgaaaagaaaggcatcttagttaaggaaagaagcgaacattctctgtgcaggtgccctgttttccagctccttcaattttataccactgaagagtttattttcttgtgagcttagcatgttagttacagaacatttataataagttatgtattatgtctaagagtctggtatcaggagaatttcaggatatatgggctaccatatggccagaatggaaatcttccacatctcctagttgaggttgcttgagtaggacaagagtagcatcagggaaccctctgaaggggaaaagttaacagcaaaggctctggcaaggtttttcagaggccacaattatattttgaagtgactctattcaaactttaactcatggaaacatacaaatcattattgtaaacattccaacactcatattttcacctttgggaaatctgaattccagtcttacactgatttttgaagttctaaatggagccactgctcatcctaatcattaaccctagaattctgccccttcttgtatatttttcagaacccagcacactggcttctgcctcatgatagcttcatcctccccattccccttgtctccctactcagccatgttccatactctacatattcccagaacaaagattctcttcaataatttactaaaactactccagtctttcagtctcctgccaggagatagctacttaatctgatttataaatttgtgttaatgggtgttaatagctcaaagttgggtttccttcctagataatcctggtgaatttagcagggtgtatttaggttgatattccatgtaatacctatacagtcaagtggcagtatactctatgtatgggtttgaggtatttccagaagtttttgacttttcacaaaggatgggaacaataatcagaattgtaatattaatgttcatatgatatttcacatttttaaagagtcttttaaatattacaataggtctgtgtgacaggttggattgtctgtatttttcagatatggaaatagtaattaaaatctctaattgtcctaaatttacataattatggattaatgcactcaaaatttgaaatcaagtcttcaatactatttatctttctttccaattagtaagtgaaggacttatataaaataagttgatgtttaaaaaatttaaatttggaataaagagaatgtaaatttgggataaagagaagataggaggaaggtaactacatgggaaagcaaaggtgatatgaaagagaagataatggcacagaatggaaagtaatggcaagaaaagtgaaattctgacggacagaacttttaacttttctacacttttgcctaaggaaaatattaaatggagttgccttccatttgcccaggcccctttatatagcactcatattgagattgaaattatgtattcattgttctttcttttacgtttctttcaaagaaatatagaagtaaattacaaggaaataacttctcagcattgactaaaagagactcaactcttttaacctaggggaaagagttttgaaagagagaaattatgagaaaacagtttgaaaagatttttcatctctatgaaaataaaaaagctgtaataagcatatacaggtaccatggttttctgcaggagttttctattaaaatttttaagtgtcagcctaacaagggaacagttcatgcatctgtaaaattacacttgctaataatgcattttcagtgagaaatgctcttaattctcactccactgcaactcacaaagtgattgtaggcagttgtcatagtatagctatagctattcccacttaggttataacctcttgtgagctagtgccactaatgtgtgagatgttttgtgtttttagatgtctttgttattatattaattattgattttgcagaccagtgcttaaaaaagacactctgaaactgtgacatcagtatttcttgtctgagtcaaggacgatgtctttcatactgtaagtcttctataatcaataacttactctgaattgaattaaatatgttaaaacatttttccagaaaaaaaaaagatgcattacagatcaaaggtgacaataaaattggcattggcaatcttttcccctctggtccttcctaaaatagatgctagctgaggtcttccacccccaaacccttttctcgagttaacgagttggtgaaatgattgcattttatcacatttacgatgccattgattgtaagatgtgtattattttatgtatactaagaaaaaatatactgattataattgcagatataggaaaatatccatgttagaactgatgaaatttgatagatcaaatcgaatagaaaattaagttccttatagcctctgtatattagacctttgtcagatgcatagtttgcaaatattttctccctttctgtaggttatttactctcttgacagtttcttttgctctgcagaagctctttagtttaattaggtcccatttatcaatttttggtttttttgcaattccttttagtgtcttcgtcatgaaatctttgctggattctgtgtccagaatggtatttcttaggttatccccaggatttttatagttttaggttttacatttaagtctatactccatcttgagttgatgtttgcatgtagtgtaaggaaggggtccagtttcaatcttctacatatggctagccagctaccccagcaccatttattaaatagggagtcttttccccattgcttgtttttgtcagctttgctgaagatcagatgattattggtgtgtggtattacttctgggctctctgttctgttcctttggtctatgtgtctgtttttgtaccagtaccatgctgttttggttactgtacccttgtagcatagcttcaagtcaggcgatgtctccagctttgttcattttgcttaagaatgccttggctattcaggctatttgtttggttccataagaactttaaaatagtgttttctaattctgtgaagaatatcattggtagtccaataggaatagcattgaatctctaaattgcttaggacagtatggccattttaacaatattgattcttcctatttatgagcatgcaatctttttccatttgtttctgtcatctctgatttctttgagcaatgttttgcaattgtcattgtagagatctttttattttttattttattattattgtactttaagttttagggtacatgtgcacaatgtgcaggttagttacatatgtatacatgtgccatgctggtgtgctgcacccattaactcgtcatttagcattaggtatatctcctaaagctatccctccccccaccccacaacagtccccagagtgtgatgttccccttcctgtgtccatgtgttctcattgctcaattcccacctgtgagtgagaatatgcggtgtttggttttttgttcttgagatggtttactgagaatgatgatttccaatttcatccatgtccctacaagggacatgaactcatcattttttatggctgcatagtattccatggtgtatatgtgccacattttcttaatccagtctatcattgttggacatttggattggttccaagtctttgctatcgtgaatagtgccgcaataaacatacgtgtgcatgtgtctttatagtagcatgatttatagtcctttgggtatatactcagtaatgggatggctgggtcaaatggtatttctagttctagatccctgaggaatcgccacactgacttccacaatggttgaactagtttacagtcccaccaacagtgtaaaagtgttcctatttctccacatcctctccagcacccgttgtctcctgactttttaatgatcaccattctaactggtgtgagatggtatctcattgtggttttgatttgcatttctctgatagccagtgatggtgagcattttttcatgtgttttttggctgcataaatgtcttcttttgagaagtgtctgttcatgtcctttgcccactttttgatggggttgtttgtttttttcttgtaaatttgtttgagttcattgtagattctggatattagccctttgtcagattagaaggttgggaaaattttctcccattgtgtaggttgcctgttcactctgatggtagtttcttttgctgtgcagaagctctttagtttaattagatcccatttgtcaattttggcttttgttgccattgcttttagtgttttagacatgaagtccttgtccatgcctatgtcctgagtggtaatgcctaggttttcttctaggatttttatggttttaggtctaacgtttaagtctttaatccatctcaaattaatttttgtataaggtgtaaggaagggatccagtttcagctttctacatatggctagccagttttcccagcaccatttattaaatagggaatcctttccccattgcttgtttttctcaggtttgtcaaagatcagatggttgtagatatgcagcgttatttctgagggctctgttctgttccattgatctatatctctgttttggtaccagtaccatgctgttttggttactgtagccttgtagtatagtttgaagtcaggtagtgtgatgcctccagctttgttcttttggcttaggattgacttggcgatgtgggctcttttttggttccatatgaactttaaagtagttttttccaattctgtgaagaaagtcatttgtagcttgatggggatggcattggatctataaattaccttgggcagtatggccattttcacgatattgattcttcctacccatgagcatggaatgttcttccatttctttgtatcctcttttatttccttgagcagtggtttgtagttctccttgaagaggtccttcacgtcccttgtaagttggattcctaggtattttattctctttgaagcaattgtgaatggttagctgtattccaagcaaaaaacaaacaaccttgttaaaaagtagacaaaggacatgaactgacacttttcgagagaagatatacatgtggccaacaagcatattaaaaaaatgctgaacaccactaatcattagagaaatgcaaatcaaaaccacagtgagataccatctcacaccagttggaatgactattattaaaaggtcaaaaaataaaagatgctggcagggtcacagaaaaaagggaatgctttatactctgctgaggaagtgtaaattagttcagccattgtggaaagcagtgtggaaattcctcagagaatttaaaacagaattactatttgacccagtaatcttatttttgaataaatacccaaaataatataaatgtttctgtcataaagacacatgcatatgttcattgcagcactattcacaatagcaaagacatggaatcaacctaaatgcccatcaacagtagattggataaagaaaatgtgataaatatacaccatggaatactatgcagccataaaaaagaacaagatcatgtcttttgtgggaacatgatggatggagctggagactattatccttagcaaactaacacagggactgaaaaccaaataccacatattctcacttataagtgggagctaaatgatgagaacttatgaacacaaagaaggaaacaatagacactgatgtctacttgaagggggagggtgggaagtgggagaggagcagaaaagataactattgtgtacttggcttagtacttgagtaatgaaataatatgcaaaagaaacccctatgacatgtgtttatttatataaccttcattatgtacccctaaacctaaaagaaaagtttgttttttttttttaaaaaaaaagaaaagaaaatgtgatacatataaaccatggagcactatgcagccattaagaagaatgagatcatgtcctttgcattaacatggatggagctggaggtcattatccaaagcaaactaatgtaggaacagaaaaccaaataacgcacgaagtattctcacttataagtgggagctaaacaatgagaatacatgaacacaaagagtggaacagtagacactggggcccacttgagggtgggattagggagaggatcagaaaaaatacctatcaggggccatgcttattacccaggtgataaaataatctgtataccaaaccttcataaaatgcagtttacctatacaacaaacctgaccatgtacccctgaacctaaaataaaagtgaacagtgaaaaatacgaaacagaaagattcctgaatgtcttctgatggattgttaggcctggtctctaaaagatcctttcagggttatctgattctataggaaacttaagcccttcattgtttttgattattttacaactctgtttagttagaagctaacttgtaaggggctgattgtaatgtaaatgattactgtttgtataagtcaaatgagcttttgttctgttaaaatgcagtggattctcaccctatagaattggccagtttcctattcattagcaaactcatgtcagcattcccaattatctgtagatgtgtctgtcctttgtagagtctccttgaagcagtttttttttttatttacaggttttctcattaattaatgacttaaataaaatatctgtcatgttcattttatatttgtatgagccattattttaccttttaaaaactatttgttaacaaaccaaattgcagtcactcatgatattttaaggatcacaagctgttgcggtctttttaaaaaagtgtattttgttattgcaaaataccatttaacttccaagtagaggtcaggggtagccctggaaacaaagggctggttatgtcacttccgtatttgtgtactgggaagaggtctcacaaagagctatgctatgctatctttgtctaaaaaggatcatggccatgactttgagccaaggtaagcaagaggaatcagaccggtatgatcttctaggaggcaagcattgattctagttctagtagactaagctagaacgaaatgatatgttttttttaaacattttttgagatataattcacatatcatacaattcactcattgaacatgtatagtcaatagtatttagtaggccgggcgcggtggctcacgcctgtaatcccagcactttgggaggccgaggcgggcagatcacgaggtcaggagatcgagaccaccctggctaacccagtgaaaccccgtctctactaaaaatacaaaaaattagccgggcatggtggcgggcgcctgtagtcccagctactcgggaggctggggcaggagaatggcctgaacccgggaggcagagcttgcagtgagccgagatcatgccactgcactccagcctgggcgacagagcaagactctgtctcaaaaaaaaaaaaaaaaaaaaattggatttagtgtattaaaatatgtgtacagtcatcaccagacaaatttagaaagttcatcttttcaaaaagaaaccatgtatcctttagctgtcaccctcacatcccccccatgcctttttgctctagccctaagcaactacttctctatttcctatctctagatattctagtctttcatatgaattgaatcatgtaatatagggatttttgtgactgacttctttcacttagcataacattttaaggttcatcaatgtagaaatttgtcagtatttcattcacttacatggctgcataatattccaccatatggttataccacattttatctatttgtcaattaatgggcatttgaattgtttccaccttttgcctattgcaagtaatgctgctatagatactcatgtacaaatttctgtgtagacatgtcttcatttttgaggggtatatacctaggagtagagtttctgggcattattgtatctttaattgctgaagaacttccagactgttttccaaagggactacaccattttctattcctgccaacagtgtatgagagttccaattttgccatgtccttgccaacacttattatttttatctcactttttgattctagccaatctggcatgtgtgaagtgatatctcattgtggttttgatttgcatttccctgatgaataatgatgtggaatgtattttcaagtacttcttggccatttgtatacctttcatgcagattctttagccatttcttaattgagctatttgtcttttaatcattgagttgttagagttctttatgtattccagatacaagtcccttatcagatatatgatctgaaaatattttcttccattttgtgggctctttttgctttcttaatggtgttctttaaagcaaaaagaaaaactactgttgacaaagtcttatttttttcacttgttacttatgctttttgcatcatatctaagaattggttgtcaaatccaatgtcatgaaaacttacattttcttttaagaatgtacagttttgtgcttacatttaggttctggatctgtgttgaattaatttttatatttaagtaattttgtgtaagttatagctaggattctaatagagattgtgttgattctgtagagtattttggagagtataaccatcttaacaatgttgtcttctaatccatgaacatggaatgcttttcatttatttagatctcatttaatttcttttcatgttctttttaaatagtacaagttgtatacttcttttgttacattatttagtattgtttttatgctgtagtgaatggaattcattttattttgggtttaattccaagtgtatagaaatacaattgatttctgcaatttatcttgtatcctgcaaccttgctgaacttattccttaagactaatggatttttagcagatttcttaggagtttctatatacaagatcatgatttctgcaaatagaagtacttttacttcttttcaaatctggatgcattttcttcctttttcttgccaaattgtcctcgctagaacctcaggtacaatattgaataaaagtgttgagagtgtacatctttgttatgttcctgatcttaggaagaaagcatctagttttctgttcttaagaatgatgttaactgtgggcttttcatagatgtcctttattagattaagggggttctttgctatttccagttgttgagtggttatatcatgaaagtgtgttggattttgtatctttctgcatctgttgaaatgaacatttgattttaaaacttctattgatatgttttacattaattgaatttcagatattaaatcaaacttgcatccctggaataaatcccacttggtcataatgtatcattactgttatatgttgctggatttggtttctgactatgttgttgaggatgtttgcatccatattcctaacaggtattgttctgtggctttctcttcatgtgatgtctttgtctggttttagtatcaggataatactgagatttgctcttcaagttgaggtattcaagagagaaactggggaagtcagcaaggcagcaggaacaacccaattaaagtagagttggcaggcaagatacagaatgtggggtacgtgacatagagggaattttacagtgtagaaaattttttatgtttgacagtatatttgaagatagataaatagatagagagataacagacagacttagaatgggtgttgtttgatgataggtagatgaaaaaaattgacaatatttgttaaaattttcatgatgtaagttttcagatttatcagttccctattgctgctgtaacaaattaccacaaacttagtggcctaaaacaacacaaagtcatgattttacagtttggaggacagtcaaaaatgagtctcatgagactaaaatacaagcattggcagagcttcattcctcctgcaagctgcaagagggaagttttttctaaccctttccagcttctaaaggccacccacacttcttggctcctaaccctttcctccatcctcaagactggcagcatagcagcttcaaatctctctccctctttttctgacctctctttctggtgtcacttttttttttttttctgactctgagtcttctgccttcttcttttaaggaacttgtgactacactaggaccacctggatagccaaggataatcccgtcccaagactaatcagattaatcagacttaatcacatctgtaaagttcctcttgccatgtaagtagcatattggcaggttccggggattacaattgaggactttttagtggtccattattcagcctactatatcagatagtaatccagtgattttctaaaataatacttcttgaatacaattatatgccattgaatctgtacaattgaatcgatgtataaaaacggtatataattgtattctatttgaaaaacttagtgttgtcattcatcttgcctcaggtaacttgcagttaagaatcaagacataaacaaaacaaattttgcaagtaggatttatttgatgccctcaacagggaatgaggtctaccttttccattcaatgtagttactgttctccaaaattgtagtaagttttgccacgtgtgtattttgatgcttcagaaccaggaaggaagtcagcaggtttacttaggctagagctcactcttcactctgtggcaggttttatccagtctcttcttagacatatgtttcccagcctttttgcatgtcttttctgtttttagcctttttaagttgttcttatacgagagactgatactttataccaataacaggcagcaatctgatgtggaaataaaattcccgagactctaaaaacatgtggctgtaaaggcaacaagaaagagtcaaaactttctccctcctgtttttgttgcctttctggccgcatgttatcagagtctcaggactctaaaggtccttattatcaatgacttctctgagcacacatacaccattaaactgctggtggactacttacatggctatcactcttactcctcccccttccacacccgcatatacctacactctgatataatacaagtttaggttttttattacgtatgagatttggtcagttggggattatagaccacaaaactgccacctttgatgagttccgagtattagcattgaggaatgattgcaccagctggcaatcgtgggaagctctcggacctagcttttatgaagaaggcaaagtgtggggagggggttgattagcaggagatattatttgtctatagagaaaaatacacggaaaaacaagattactttttagattatgtcattctgaagactgtatagtattctacttgtaagcaaatactacatttttcaggcatataagactaatgacacacagccaactacaaactgggatttaataatatatttcattaactcagctccagttccattttctatgttgtaggatttgaaccagacacaaatgatttctcttaagtccttgcccttttgtgattctgctgagagcacaaggaacccacaataatttaccatatgccatagttcatcctgttttgttttttaaaaaactcgcaacaacctgacacatttgttgtggttgattctgggcatttaaatatgaaaacaatcaatgtgcatttgtagagaatatgacaagtgggaatttgtgtgcaggccaatttttcactgacctgcattcaagaacattattataacccaagcttgcctcccaagttgtttaaatgagttgatttcccagtatttgtgtgggcacgttgagtgatgagaatgacttcagtgtaagcccgactccctttctatttcccctcctctgggtttcagttttgtgctgattcagatgtgagctctgtgcattcaaccatccagttaatacactgagacaagaaagcaataacttttggtgattacatgagttgtagagaaagaatcaagggtgcaggtgaataaacttttgctctgggaatggcacactggatataattttctgctggttccaaataacaatactttaaatcttgaataagtctttcatgtatctcctacctgttgtatctctatactcattctcattctggtataatatcaaccttttttaaatgtgaagtattatcatccccattttatagatgagaaaacaagatgagacacaagatgccagatgaattgtctaagttcatattttctaacctagtcctctatatacataaaatggattcatcattagttatttacataaccatttttaaaatcgttggatgtggtagtagtgaaatagcctatttccaagtcatttttctaaatgacaatgaaatttttctgaaattgggccggctcaaagacaaacaagatagcaaacatcttagcagttaaaatcaggtttcaggcaccatccaagagattcctttccactccatgaaccacaagtgcacaagctagtagatttgtagtgtgtaatttaagtgtaacttaggcttactgtgatatctgatttctagggtaattataaattgttagcattcatcgtggttctccaagaatttgtggtaaggattcgagggaagaaaaaagatatatttagcatccacaaaggggaataaatggttaaaacagtgtttttgagtgtctaaagattaaagggtgaaaaagaacaatgttaatagagctaggaagacaaggctgcaggaggtttacactgcatgcagggctttttcagcagtgagccaccactttgtcctctagattgtttggagatcaaactgtaaaaaagctaaaaatatttggagaacactaggtttaaattaaaaggaggggagatcaaactggagaaatgcccattatggagaccaaaatagaagtatctgcatcagagaccttttacatatacccatgtatcccaaatagtagtgaagtatttgcatagctatatgcatatatagctatacttcaaggaaaatcaaggcataggttacatggagagcaggtaaattcccaagctaaaggggtgcgtcagggaattatacagtattttctttccattccagagaaaagagtaggattgaactagcaagagagggtaaagatcctctggctttgagaatattataagagccaaaaacaagaacaaatccatgcctttttaattttttttgttttttgacttctagctttagggttcatggcaggtttgctctctagataaattacatgttggggggtttgctatacatattattttgtcatccaggtagtaagtatggtacccgataggcagtttttcaatcctcaccctcctcccacccgcctcccacccgcctcccaccctctgccctcaagtaggcccgatgtctctggttcccttctttgtgtccgtgtgtactcagtgttagctcccactcaaatcagtgctttaaacatcttgacaaaaaaaaatctctggagattattgcataatatataacttaccttctctgtatgtaatttataccttgactgttccttaaaatgtagcagaaacaaagtatgtatctgtttacttcaattcataatgaggagggaagatgacaatagggttcaaagtctgactctgtaactaatgaattaaatggtactacaagtaacatggattcttcatatatacaaagaggactgattgtatatatgatgatagatggtatccaaggtttcttttggtttgaaaaccatggtcgctgaagccacagagaagcgcgtgagtccagatcctaaatgtcaggagcttgatattctaaggaggcatccctctcctccttacattcctgtgtggcagcaatgaacggtccccatgagaagctgtaataggatgagactcaggggacttttgcttggaagctgtgttgggatgacatcgcgttgtgcatacccgtctcttgtcggttttatgagatgtagttcactgtatgacagtggctttgaacattgtggaagaagacgtcctatggcatcactacagtttatcatctcctgctgaaggttctcactctttagaagttcacagccaagcgagtactgggaaattattattattcctcatttacactgagacagagttgaagctctggccgcagtcaataaatcactttgatgatgattcattagccgtgttgagatcccccggccgctccagcgccagcgtcacacttgggctgtcttctcatcttaattgcaaggtttcacttctggagaagcacagcagcctttgccactcacctattttctggacacatttaatttcaaattaacaagttttccctcgcaactatctatctctaaatccggtttttcgtgtgtgtgtgtgtgtgtgtgtgtgtgtcttaatgtgcttaggaaaaagggaaaaacgtgtttaggaaaaaagtgtgtgtgtgtgtgtcttcatgtgcttaggaaaaaagaatgctttcagactctcttttcttaaacaactacagatgataactaatttttatcttaacctttaagaaattagttatgtgcagtgtacaagtggaaagtctgccaggagagagaaacaaattgtggacaattgaaatctgacatacaattaagaaaaatgtaaattgaaacttgtggtgttttcactaacttgtatcccaccaaatgctgattttctagagataacagtgaagagatgccatttcctgctgccatggtacatgccaactaccatataaatttaataaatgaggctcattccctataggtgggtgcagtaccaaagggaggagaagtctggcttgtgcttgtaggacaaagtgaatgaggacagagctagctctggcagccttctcctcctcatcccctgctgctgcaatggtgatataaatatgcgctctgttctcccctatccttactatgtagctctctttctttaaaatgagtaactttgaactaaactatctcaaaatctttttcatctctagcattagtctttcttctttattctcagtaatagaattgtactattttatcctctcctcctgagagcctattaaaagcatttgaggtccaacacatattccattttccccataatacatgacctcaccccctggtattctcagaatgtgttctccctttaacgtctccccctgcacaaatgttactcatctacaagggccatttcagatcacatccttcatgaagcttttataactaaatgcaatttctctttcctttgaattcctaaagtataccatgtaactcttccatataaatagcatcattatttgtgtatatttcttattcccttgactagaatggatttgcctcaagaatttggtgcttgtcttctgtgtcccctcctagtcatccagaatagtacctttgcatattttatgtaattaaccacctttttaaaatcagcaagtgcattttacccacacgagttctgtaatgggacacggaactaattgtgctatggtaaaaaatgttcaagcaagagttctttattataacttttaaagcaattagaagaatgaaggataagttccattttaagggtaaaaatacttgcaaaccctgccagaagttgatatggtttaaagtaatacgatccaaaaatgtgcctattacaaaagagggtttttgagtctgagtgagtgtatgtgtgtgtgtctctgtgtgtgtccagacaggggcttacctagggagtggcagtggaggaatttttggaaattattgcctttcgggggatttggagttttaaatgcatcctctgctccctaggatgtttttttctgactcatttctttactgctctgagcgtgagtcaaggtctaaagcatttcatttagattcattctccttttagatgctgaaaattgtacagaactcttatttgagagcagacatcattgtaaaaacaaaggcaaatgaaattggttcttgcattattgtgtcctcattcatgaaacttgtaatatttgctttgcaaaaagaaagaaaacagaaaaatcttagttcaccttactctactgtttccaacaggcattcgtaatggtgttacacatatgtaaaaggtgggtttatgtttgttccagttattttgtatgttttatctacataactaggttgtatactcttttagtttataggcccttcatgttttgctcatcgtagttagtaaatccttaatattagatgcttaattggcattgattaataataggatttcttatcagggttgctgcttttaaatattcagatcttacacatttctctgtcattgttaactagaagaagtaactaaaggggttacttagccctgggaaactgtcatatttacagattagtaaaaaaaaaaaaaaaaaaatagcagatcctatataaaaaacaaaaggcaaagagtgaacggtgagcaggccaggaagaagttagccaagaattaagctatcattgaaagagggattaataagttggatcttatgtaaaagagattaaaattgttggatttttactaaagaaatgcattggtcactcttaaaaatgcagaggagtaatagcatagtaggaacagaagccagatttctattcattaaggaggtattaaaaacatactgaaagcacaatggcaggaaattaaacttttaaaaagaagtttatcagtgatatgagaagatatatacatgtgaaggcttcattatcaagaaggcctttatgtccaagatgaaaggagtctacttatgttgaaagatcaaaaggaccaggaaactccagagatccagggagagatggaagaaacggggaaaggatgggtgaagtgtggaagtggtattcctcaagatggaagatggaattcagactggggatgggagcccttcgagaaaagtgtgtttagctccacctttgaaagtagagacaacgaaatgagagatgatgagttaggtatgaaggtgaagacactcagagatgacagaactgataggtggcaagagtctttaccaagacagagaccacagcatcggggataaggcactgggttaagggtaggatttagaaagtttaaaatacttatcaaggagagtgggttacattttgaaccacaacatggactaaactatgttgaacataaagtatttttcagttctgaatttccctctagcagaattgtagtaggaaatagtgggcagagtggactggaggccctgactgtgggcaagcctgcccttgggcagcggttctcaagtgccacaatatgtctcaatcacttgtcaattaggccccaagtactctgtaactaagtgtaagtactcatgattttgactgagtttttaaaaactcattaaagcagattaaaatttactcctaaaaatcatgcctctcactgtcaatttagtgtacttccttgaactgaaaagaaacctgtggagttagaatcagcgttatggaaattgtatgtgctttccccctcatctgaaggtgactcatggattcagctgctgttacagatttaccattaattgttatggcagtcacaaattatttagagcttcatggttcaagttttatagttagttgggttttctgtgtaatttttctgatgaattaatttttttctctgagacaaggtctcgctctctcacccaggctggagtgtggtagcacgattatggctcactgcaacatctgcctcctaggctcaagcaatcctcccacctcagctccccaagtaactggaactagaggcatgtgccactatgcccagataattttttgtagatatgtgatcttgctatgtggcccaagctggtctcaaagtcctagcttcaaacaatccacctgccttggtctcccaaagtattgggattacaggcatgagtcagtgccctggccaaaagaatgaatttttaataaagaaggtattgggcaaaaatacaaaaaattaggcatggtggtgtgcacctgtagttccagctactcgggaggctgaagtgggagggttgcctgagtccaggagttcgaggctgcagtgagccatgatcgtgcccctgcacaccagcctggacgacagagtgagactctatctctttaaaaagaaaacaagaacgtattggccgggcgtggtggttcacacctgtaatcccagcactttcggaggccgaggcaggtggatcatgaggtcgggagatcgagaccatcctggctaacacggtgaaaccccgtctctactaaaaataccaaaaattagccaggcatggtggcaggcccctgtagtcccagctactcgggaggctgaggcaggagaatggtgtgaatctgggagacggagcttgcagtgagcctagatcgagccactgcactccagcctgggcgacagagtgagactctgtctcgaaaaaaaaaatagaaaaagaaaattaaaaaaaaaaaaaagcaaaagggtattgaatggaagaagaaaatgagagtagcgcatcaacaaatttcttgtacttgtatctaagcaatctaaaaatacaataggggatagaggggaggtcactttgccatgtcagtcagtattttcaaaaaaaagacaagtttttaaactagaagtcatcaaatatgttttgcgtacgccatttctcaataaaaaatgtccctttgcttggtctggtcctgggtccttttcttctttttatctgtaaattctccctaaatgatcttaccatgacccatggctttaaatacatctaaatgccattgtttctcaaatacatagttcccttcctgccctctctgattattccatttgtaccaagattcctgggatgtaagctaactagagcatagaaacttcatctgctttgttaacaacttatctctagtgccctcaagagcactgagttgttcagtaaatctttgttgaatgaatgcctaaaaaccttgtctaacccggtgaccataaacgacaacctgatttttgcctcacctgttcggttttccccatgtcagtaaaccaccatctacccaacagctcaaacccaaatccttaaactcattcttcccttttctccatctcctagtcccatcctagtctaggtgatctctaccatggaatcctgcagtggtctccttccttactgatcactttgtctaatcattctttgcaaaacaaccagagcaatctttttgaagccaaaataaaacttacttacgtcactccccagtttggcaccctctaatggctttccttcacatttagcataaaagccacactcttgcctgcatctcatgacctggtttgttctctcttccccagcctaggtgccagtttcccttcactcacttaactctagtctcagtgacctttcagtttctgccttaggcctttgtacctgcttttccttctgcctggaataccatttttcctgtctttcagtggatgtcccacattgtattttttgagtcttagcttagatgttacttctttaaggaggttgtttctaataaccagatctgcattagcatgaccaacccaccaacaaagcttctccagcacatcaccctgttttgttttctttattgcaatcatcactgtctgaaattattgaatgagattattgagtgtctttaaaagcagaagttgggtctcagtcagtcatttctatacctgccaaaacacaatcacatgccttagacacaaatggatcgttataaagtttggaaggacgacggagcgggctttaaatattggttctgctacttgctaggtatgtgaccttgtgtttcacctctctaagttatattttctcatctgtaaaacaaataatgatagagaaaataataactcttcataggaatgttgaaaggactaaatgagatagagcatgtccagtgcttggcacacagtgtaagtagtggatgttgttacggtgatgatttttatggatacccaaaatgtcaatcccaatagaatccaagagtagcccatcttaagtgactgagagtctaatattggtgacattctataatattgactgtcatagagccaataaataaatattgtaccaaaaacttagctgtgaatttaggcctatattcttaattaagaaaaaggtaacagtggaaaatcacttctgagtcttataaataggaaattggatttcctaatgggtaatttaaaatactttgggagcataaatacacctggagcactcaagctataagttggtgactcagaaaacaagggcacagaatcttgaaataagcaacagcaaatgagcacttaagcacttaaagagcaaattgcagaaaataaattaattcatttaaatatgcatgaatctcctgagtggggaatatgctgaaatggtgctgaatgatttcttttgttacgtgtgttcagaagtattaataatgcctcactttgtgctttatacctttgaggagaacaaatcccacaatcttttgcctttataaattgtttttaaagtaatggattctaaaacaggaaattctaatcaaagtatacactggtcacattgatttggaaaagtagataggaagtttatcagaagatagatggatccctgagagaatgaaaagtagttctgattacatcatttaaaaaaaaaaagtgggggtggcctttggggaggctgatataattttgcagaaacttcttaaaagttagaaacttgctgaccttttgcctaaaatacatgctaacatttaaccaacctctcggatactgtgtggcacagcaatgtaagttctaagaatcaatatactcaattgtagaccatagtgtatgttcaggatatttatcagaattactaactcagttatttcagctctcatcagatctcttaattttcattctggccagcacagacactaaaaatcttggtattttatgtccttgcatacttaaaaaccaactttatgcttacataattgaagaaataaagaaaaaggaccaggggaggaggcagacataatagaagcagaaacaaactctcaataaaaggactataagatgcaaagctatgctctctttgatctttttaaggagaaggatttaaggaaattccgatttgccctgcacatgctgatggctagggagcttccttccttggccacatttcgtctttgatgccaaggcagtgaaggggagcttggcagcagagcaagagctggaaccgaagagacctcaactgtggagtagatggagctgagaaaaggatttggcagccctgcctgagaacagaaataatcaaaagaattgccaagaaccataaaacaagaagggtagggatatgagctacactgacttggttttctgaacatggaaaaatactaaatctattcgcagtctgttattatgctcatgtatttctatgagtttgttattacagtaatttctattttgccttaggtctatgaataggatcaagacagataagttttgttgttgtttgttaagtctggaaaaacacatgcttgctcacacaggatttaaatatgtgtaacttatgtataaatgcatatatccccatagttgaatatttccattgatgccaaaagttcattatttttttcttttgggatgcagtgatatgtcacaattaaataatcttagaaatcttttggagcactgtagaaagaaacaggagcacgttctgggaacgtggtgcagcatttgcagagtatgtcctgatgggtaagggatatgtacatcactggcatagcaagtagaggtggtggaaaggtgagaggcatgctagaagtattggcgggatcagctcatgtaggaccctgcgtaccgtaacacgatgtttggatttactctttaggtaatggggaaagattttaagccggggtgtggggaaatgctcacctttgcgtttaacaaagatgcctctggaatcaggtacaagttgtattacagaaagatacagtaaatagattttttgttcctttttaaaatcagaccatatagtaaactagaaccttatctcagttacctgaataaacactcaaaaaaagcatttcttactcattctaaaaagaaaaatctattgagcacaatttttaaaacttttggctacattaaatgtattatcatctttttcaatatgtatcatttacctttgaaattccaaattcaccttctgtgtctgcttacatggaagggagtataaggatgttctgtcttcagggttatgatttgtggaattacttggttgttcccaacaaacaaaattgcaaacgtctcttctccttgtgggatgtggtaagacttcatttctgtaatatattctgtgctgttgttctgaccaaacctgatgacccaacgatcttttgtttaaggtgaagtgatgtattttaaagtccagatgtaccacaaatgaagttctttagacattagaaaaatgtcacaattacatactcaccaactactcacccacctgactgcattttacactgcctgttactgttgctagaaggattatgcttacaggtagaattcacagagcacctacgtgaaatgagttagtatgtacttatgtaggtactaactgttcaatgatgcttctttaagaagatatatcctgtaataaactgaaaagcaggatcttcaagaactttcagtatgaaatattttccatccactgttatgcttctagtgattaacttgccttattaatagctctgtgagatgtttttctaatcagtgcacacgagctgtcatcaaaactagaattcctaattctgagccaaaacagttggagaccaaccaaatcaggacctttaataaggcttataaggaaaaaccatcaatcattcattccctctccctggctttgcatacattattgaaaaattttatcaaagtttttatactaaaaagccttttatgacatttgaatgttatacatattagcatgtagtattatctaatcaaaatttgatttgcaagggtgaatcagctaatgtattcataattttaatcctgttaacaactctgaaattggctgataattaccttaggattagagactctaatttgtacattggtaatgtgtttccagtcaccagctaatgtaataacaataataaattatacttctatcttcattgagagtgtgatggacagctgaattaggatatttccactggaactgaatatcaaacttttcccctaaatattaaagccttgtaaagtttctgaacattcaaggccacgtttagcgctgtgctagtcaaggcttatcatgttcccagtggttttaattcagttaaaatctgtgccttagtcttatcagcatcactatcactgtcagcagagtttcctcagtgcagtgccaaacaaaactgcctcataaaccacatgaaagccaaaaacttggccatgtagctttacctgcatttatagcaggcatccatctaattcacattgtcagagaggcctcatgtagaaaattccgttgccccaaaatatttctaatgatgtgttttaaatctatgcaataagagtaaattaatgatgttaagccaaaggattttaaactccttcttaaactgcagaaggctttgcttaccaaactttacttagaatcttaaagcataaagatagataagcaactgttccgtctgaagtataatacaaatgctatcacatagggtgttttatcacgtaagatttttaaaatcactgaaataagttcataacattgtacatgaatttcacactttatttatggactattttttcctgcaaaaaataatagctcataaaaatgaagtgaatactgagtgcttccttttgtgtcagcaactcttccaactgctttctgtgaatttgtctcctgtaatctaatagtgtcaagtactattttacaggtggggaaacagaagcttagaaatattagctttgttgcccaggatcacaaagcctataagcaatggagttgggatttattttttcctctggccatctgctgccaaagcccatgtgcttaccactcatacactcctacttactgtagagttaggatctttgaccagcatctcagaattcacaagtctgctatggagagattcttcttttcagacatgcttgaagagaattttgcagagcattagttgcctgatgactttctaataagcccaagggccaggggttttttttgtttgtttgtttgttttttcttattaccttctttgatacctcctcacgaattgctgaagcaaatgcagttagagctggattctcaaccctggctgtgcaccgggatcacctgggagtctatagaaagtactgctgccttggtgccacatgttgagggtcaaggtaattggtctcaggtgtagcctagatgctgggtttttgttttgttttgtttgttgaaaagctccctaggtgtttcctgtgcagccaaggttgagagggctgctctgaaagctgagctgctgtgctcatgcattggcctacataaggtgtgcagctacataggtgcaactggcagagtaaggtgggccacaaaaatgaaatcattctgttttcgtgtaacaggatctcttagtaatcctgagcgtttaatatcttcatatcactccacagaacccagtaattccctaagaattcacaaatggattcttgaacaacagtctaggtggtcccgttcatcgtatatatgttttatgacccctggccttataacatgtttgtgatttgagaggcaataccgtctcaaagtctggaaaagcactggagcatagaacatgggactgaaaatggacaagttctgttgaaaggaaacatttgtttatgtcaattaactgcagtggtaaaagaaacctattctttacatggagctcttaatatttctttagtaacccacactacagcttttagccagaggacatgtcatatgtaaccccttccttatgactgtgacagagcaaaatggctagtgtccaggaagggagccacagccctagcaaaatataaataaataaagaccataataacttacatgcccatcactaaattattattagccaaggagtggcaagtagatgagctgttttctgtgattgcatgtgcatgcaattatgtttctgtctagagtaattaactattcacttgttttcttggaaacaaaatagattatataccatcacatgattttcactgcagaaaacaaatagctgtttagtggtacaacattccccaccccaccctcaaaaaatccgtaagttcctcctcccccaatctaattttggtgtctcgtgacttttaaaaatcatgattatttagttctaagttcactatgctgtcatattaagggtattccttttttaaattacagattagaatttatgttttggcttcctgcttccttttttttctttctacatccagattacatttgtaattattttctgcataacttcctatgtcctgtaggtaagttttcttttttctgagaattgtgttacaacgtggattaacagaatccttggaagcatgaagacaaataattgcctacaaaagacacgaattgagacaaataataattgatatgcttgaggtctaagttaatttgtaccagtagcctataggattgtttttagctggagggcagagagcagaatcctcttggacagctcccccccttggtaaccgccaactgtgaatgcacagaacaatgagtgctgaatcagggcctcactaaaaagttgtcattttgattttttctcaattaaaatacatcatgtgtgatattagagttactgaaattattatgccaaatgatgcattgaccttgtagtaaattttgtgacttctttaaggcaaaccactcagccgtgcactgaaacctgagctatagaaaaagaagagtaatggcattgcattgacagtctgttggttttctgatccatgctgttgccccccaggactctaagagccctgggtctttgtcagattcctttcagtacctcaattcctcgataattgaaaaataaaataattgtggtgagctgaggaactgtgggtcaggactgatgtattacatcctttctttctctgtgtgcccagattgccacctggctttctcatcattctagcaccctcagactgcgtctggatctgaagcatctgtctctgtattattccacactcttggtaaaagtcactaaggttcagttggccatatgagtgggaaatatgagtgactgcttgaagcaacacacgctaaggaagggagagaaagagaacacctcatcttctcctgtcagtctcttaaagtaactgactcagacaaaaggcaagagagagtagccatggcagtagctattgccttggcctgggcgacccagtgttcatcagctgcaagagctcagtacagcctgcatggcacagtttcacacagagcagaaacagccaagagggtgaggactgtaggaggactgggttttctcagctatctaagattttttttttttttttctgagatggagtctcagtctgtcacccagcttggagtgacgtggagccatctcaactcactgcaacctctgcctcccaggcttaagcgatcctctcacctcagcctcctgagtagctgggaccacaagcatgagccactatgcctagctaattgttttgtatttttggtagagatgggatttcaccatgttgcccaggcaggtctggaactcctgatctcaagtggtccatccaccttggcctcccaaagtgctgggattacaggcatgagccaccgtgcctggctagaattttttttttttaattgagaaacttcaacttgacactcgacttgccatgataataaactgcttagaattgccgtcccaactatatatgtttcaggatgtacctgtaaagaaaagccagtctgatgaatatgcgattgaatgtctgatcaaccatgacttgttttctgggctagaacttgttttttgccagaaaaaaaaaaaataagtgtaattcaagtgtatgggaaaagatactagtccaattcctatggcatagtttgaattgttttgttccttcttctatagttgcattacgttcgccattagtgacccctgcagaaaggttaatcaatccatcagtcaatacaagataaaatagaagtctgggtttcaggacccaaagcctgacttttctctttcttagatacttcagctgacttccagcagctcttgctctggctcaagatgagaggctcaccctccttggcattagagtccaactgtggtgcagtacctctgactttatcccttcatcctttaccttcagcggacattaatctgcctccctgcagaatattacttaacttcctggggtaggaagtgaaactcaaatgccataaaaagcatgcctttggtttagtcagacctagagcccacaggaatgatttataatgtataggtttatcaatgaaacatttttccactttagggaacagacattattctattcctggcaataaactaaaatagatgctacaagataaacagaatgatttcaccagttcagcctttgtgggacctaatacattataagaaaaatttcaaataaattacaaattggagttgtgtcctgcaattgtataagacggttgccattgcaaagtgatttctgcttttagaatgaatgtggttttcctgcagttcaatgtgacacttatctgagcccgacagtgatagcaagacttatgagccaagcccactgttggacctgcagtgccatctacagaatagattggataatgtggattctgtttctcttctgcacttcagataatgtagccacaagggaaataagatgtgtatgtgtttagaattagctgtgtacatacagtaaggctttgttgctacatagaaaaatggttgcatatttgcaaaatgctgttgctgtacttaaggctctattacctagactcctaaggcaaaggagtgttgtgtttcctattaaattgatgaactggatagcccatttgtttcaaaaatttgtttgataatctgtgtaagatgactttctggttaccttgaatagatcgtattggaatgaatattagtttcattatttatgtatttattatctctactgctcatatctgtctccaactgccagaacataatcaccatgagggaaagatttttatctattttgttcactgatttattccaagtatttagaacaatgcctggcacaaaagcaggtcttcaaatatttgttatttgactgaataaatataactgtactttgctagtaagtagaacaaatgtggaaagatagtcagttgaattttggtttgtatttttaaaatgggcacacctatacctcttcttcctatattactgttgtactgaaaattacgtgaaataatggatggaaaagtgctataaactataggtactataaaatttaggtatcttcccaagaatctttttttttcttttggtagagctccagaaatttagaaaatgtaaaacatcacccccatttccccccataatttcctgaagtacttttaaaatgtatatatctgagcgccacatcacataggttggggcctgccagtgttcatgtttattaagaatctcagatgatcctgaagcatgctattataatatttgagaacttatatcattaaaaaggggttgaaattgaattgaattcaaaatggaagttacacctttaatattatcctcacccattattcctgataggaagttatttctgactggatatatttctttgtcttaagggaaatacataatattttaattgctgtatattatttagcttatggtatagagtattacctgacttaaaaaaatagaataaaaggatctagacgtatgtagtaaattaagatcattttagtatatcaaatttattttagagaattttgcatatatttcccaaggtagggtacaaatactatatgaagcaatataaaaaggaagcaaaagaaaaccagcctaagtttgtataagacagactttaattttatttaagaaattccacttgttaattttggtgctaaaatgctgtagaggatattaatgtgctttgacatattataaaaatagctttttttgcacggaggttatttctctattgtctttcttaaggcttttctgagaaataaatggggaaacaccgtatctttccccagatttgctaattaaccatgtaagaattaaaacattctttgtgttataatagttctatagatagatatatgctttcatagcacaaaagtatctcttaggcaagttaaatgcatttttacttattttatatttggttttgtcttgagaacagtgtctgtaggctgagtcatcatctatagcatttgcttcacaatatgaatgaatggaatatatatttactctaaaacaaagaggaatattttggatagtggataaaggtgaaatttagagtcagataagccttagatgcaaattctgaccctaccactgggcgtcttcctctaactcaccttctaagtatattcattatattcatatattcacacacacacacacacacacacacacacacacacacacagacatttatttaagtggtgtccatgtaccaggtaccactgtgctaacgtgcctgtgataaatcaaattcaagaattcaagggctcctatgacattctgggagggaagtgataatataccaagtataacaaaagtgtaactatcaagatagacagtatgataagtgctatagagtaaattagcaaattcaaaacacatagaataatggaggaaggtcccattaataatgtttctgtgaaagatccctttgaagaggtaagatctacagaatgagaaagaacccaccgcaagaagagctgaggaaagggaatctgggcagagggggaacaaatgtaaaatgcaaaggccttggcgcttctgaagaccagtaaagagacctaggacagggaatagtggctgaatttggtgtggatatgagagaaaaaggtaggcaggagggaaaactggtaggccatcgcaggaggtgtgtgttttattcgaagagcattagggaatcatctaagggttttaaccagggagtgacgccagagtaaactatccaaaacatcttgttactctcctccctaaatagctgatggatgctcattgcctacccagaagacgaagctcaagcccatttactaggtcatcaagtcctttaggacatggtctgttgttaaatactcattcctcactattttgtgccttgcccttttcagtccagcaacagcaaactgccttcagactccagcacctcccaaattgttcccaccttcctgctgatatttctgctcctctacctgccaatatgctctcgctaaggccagctcctcgctttttcaaagagcctttctcccttgtactcctaccccgaccattacaatccagaactcacagtaccacatgtatatttaatgtcctcatctgtttatgagtttccctggggacatgcggagaaaactgccaaggagtgaagatgctttcagtaaatgttgcatgaagattttgggtaaacgtagctgtgcggattaataagtttgatcaaatgccaaggtagcatagtggcacagtcttgagtagacagtaggtgctaactagatcatcattcacattcattctcattcctttccccttgtctgtctggcaagcttttattcctcttatcatgtgcaagtactttacaatggacactctgccactaggccttgcaaaaaggggtcaaatcctggatctgtctctagagggcttagagtctagcagaggagcgggagcagattcataaaagaacaagcagatatacaaatgcacaggacgaagtgataaatgagattatgaacaggaagagctaaagtcttagccttaaatgaaagtctcacctcatttgtttcttagaaaagaaggctggagaaaaattttgcattattaagccttcattacttttccaaaatatcctgcggcatgcttactaatgtattatgaaattcttatgaataaataactctaatgtcgcatctcaaaatatgtgaacaaggggtattttttcaagttcttttctgcatatttcattttgcatgttacctctaagaaatgctgtataaacagttggatatatttatagaattgatgtaccataaatcccattactcctttagataatcatgcataactgctgatgagtgtattaacccatttttactatataaaatatctttaaatggcttctagttttataacatacccatggtcaaagcattttaaagtctgtaaagataatgttcataaaaactaatttgaggctgggtgcggtggctcatgcctgtaatcccagcactttggaaagccaagacgggcggatcatgaggtcaggagatcaagaccatcttggctaacacggtgaaaccccatctctactaaaaatacaaaaaaattagccgagcatggtggcgggcgcctgtagtcccagctactcaggagactgaggcaggagagtggcgtgaacctgggaggtggagcttgcagtgagccgagatcgcaccacctcactccagtctgggcgacagagcgaagactgtctcaaaaaaaaaaaaaaaaaaaaaaaaaaaaaaaaaaaaaaactaaaatacacaacagtaaattgattcaagttagatcttacacataggcatttgagctccattttaattggctttaacattacttgttcattatttagttttgcaacagtctaaaaacatccaattgctgaacattgaaggcatgagagatcatctttccctgtcaaataaaattgcaagttctaagaaacatcaatataaatattactcatccctgtaagcctagcaagcacagtgctcatgcatcctgtttgatctgaagagcatcatagtcacttggaagacataagatctacatagatgaagaagacagtatgtagcaaaatacagttatgtatgtatttcagaaaataggtagcaagaagtataagtataggagaaatcacggtcatgctctgggaaggcctttgagttgagccttagcaattgtctaagataaataggcgaaaaagtgaaagaggcaagtgagagagatggaaaacgaacattccaggcaggagggagaatatagatctacatgcggaagcaggaatgagcatcctggcaactgagcaacccaccttctccttccacttaaaatatcctggaacctaattatcatattattacaggctaaagataggcctgtcatacaccccagtgaaggcaatttttatgctgcttcatatataacaggactgaggagtacagaggtttcagcacccgttgtagggaaagaacagatctgagtgtgggctgagaaaggggaggagatagtgaaccgaaaatagtactttgtctcgaccaaagttttcaagttccttgagggtattttcaactaagatgcaaacagcaactgattcttttaccataaaaacaaaagaaattatgttaaatccatctgaggtaactcgacagttaattttttttttgctccccttttctccctcccatgccatccttcaatttaatgtgttaagattttaaaatggcaagcatgaagtgtaacaaaacatgaagtttcttacaaagttttttagctatatttatacatccaatagcaaggccagcctatgtgacataggcatcatttaactagagaaattcttattttcctaggtctttgtaccttattacagtgaattaatacaatttaagtcttgctagaattgtatcctttaacaacaaaataatgttgctatcacctaggtgttatattatttaaatatatcttttcaaaataaattgtgttatacataaatattcaggtaaaggtttaccattttagctggatgtggtggctcatgcctataatcccaacactttgtgaggccaggagttcaagaccaacctgggcaacatagcaagaccccatctgttttaaaaaatgtagctgaatgtggtgatgtgtgcctgtagtcctagctactcgagagactgaggtgccggtgtagcttgagcccacgagtttgaggatacaatgagctatgattgcaccactgcacgtcagaatgagaccctgtctctagaaaataaaaaatgataaaagaaagctttgacttatttgagcacgtgagaaaggggaagaggaagaaacctttattaaatgcagatttaaatgccttgtgcagtcttaggcattatttactcatcataaaaaccctataaaatagctattagcattttcaaattagagattggaaaacaaacgtttagacggttcaagtcctttaaactaggccgtatagagtagaaagtatataagcatgtgaatgatacaacaagaagtaaacagaaaccaattcagtatatgtctggccaatgaggtatgattctgagtccacacacacatacacacacacatgcacacatgtgtgcacgattatgaaaagaggcaggagacatttcggaatacaggaaaaaaggaaggtcatttagtttcctgtcagtgaccatctttagagctttagtatttgtgatgacacccaaaaggtgtcatggataaagtgaacatgtagaaatgtcaaagctaagtgtaattttgaaaagaacctgatgtaaaaactgccgagataaagcccggttgaaaaaaaaaaaagaaagaaaaaacagcaataggaagatgatgattggggagatacatgagcaagagcagagtggaagatgaatggaaatataaggcagctttgcataattatgcacttcatgtggttatatacataaaaagagaccatgcttaaaaccacagtcccaggaatgagcaccccaaaggatttgtgccttttctagtctgaagaaatttggcatatgatggcccatatattctggttgccatgcgctattctaccctcctttacccctctataggcatgtgatatgcgggggagagaacatgtattactcattaaatgaaacatgaacgggcgagacatatatctttgatagtgttagagaatttgtaggcaattatattataatcactctcaatgtttctgtgtttctgattttggactgttcatgggtggtagctactgcaggctgtcattaaatggatgcaaatggtaattgtaactgatgaatgattgatgatggctttattctgtactcctggaaacagcctctggcctaccagaaaagtaacctctaaccagagagcaattaatgtaaactataggctctagcttgttttctcggggtggctgggtagggttgggggatatggcatgtctttggaacattgaggctgtcttttctggcctgtgcctttccccaagtctttttactttctgtctcagagaattgctagttagagtgagagggctaggaaaagaatctaggatttcagcatggtaattcagtcaaatatggctggtttctcaaataaaagtacctgaactggaaagctaggcagcctaggggtggatagggagcctacacctctgggttgaagaatcatttgacctacattacaaaaaaacaaatacttcagtagtactgcatttcctaaagttttacaactgcttatatagattatctaatgctctttagataacgtgatgtctcagcatccttctaaagttgtgtgtgtgtcgggggaagggcagacatatcttggtcacgtttattgactacatttgacttcctgaagaacagacatgaacaacatatatatgggggtggtaattttcttctctgcatccagaaaacttagtcctatctagttggcccatctttttgaactttagtcataccttgtagattccagttgaagtgaggttgttaagacaaacataaacatgatgaaaaattacttagaatttaagaatgccaagaaattgatgtattaaatgaggttactggagatctatttatgaaatgggagcgttccctgaccccctcacaggacttgtgacaggggcgtggctcatttgcttggcccgcacccccttacaggacatggggcatgcagatgggccggtgcaggagctgggccaagtgcttctgggctctggccccacagtagcatctggaggtgtgttacaattagtgctcttttagcagttgctatccatggatggctaagtgttaaaccagctcagtggagagttagggtgacatccttttacaccctgccctcttggtacccgggtccttgtctggcatccaggaagaatcaggtcatatggacttgaaggatagtgaacgtggggattttactgagtgatggaggtggctctcagcagaatggatggggagctggaaaggggatggagtgggaagatgatcttcccctggagcttggccatcccacagccaatctcctctctgactgtccccagccaaacacctcctgatgttcaaatgctccttctcttttctccttctctgctgtacctttctgctgctgttctgttcctctgcttgtggagcttagggtttatatgagcacaggataggggtgtggcaggccagagtggtcttggaaaaggcaacatttgagcatgaaaacaggaatgcctattcccacttagggccaccaggtttccaggcttgaggtgggggcctttgccggggaagcaccctcttctacccagaatttccttgcctcctgtccatatcactatttactgtgttatctgctagttcatagtgataaccctagactagagaaggagagaaataggagtttggaggggcagccgtgagagagcagaaatcggcctggaatcagaggctctcagttctagtcacatctgcttcatagttgagttatatggccttgaagaaacctatatttcctgatttactaatatgagagtcttttcccctgcactcccgtggcctcctttgttccacaaagagattggcagaatttgcattaagtcaattgaaatagaataccaaaatggagaaagaagtcaaaaccatggtgaaaaatccgaccacaaatatgtaggacaaaaatcaaataatctttatgatgcagggttgttgctaagttcaaaaaagataatatattgaaagaagtttatactttaaaggtattgactgggtggtatttcagatagatacagattcagcaacaaaatcttggagctgaataagactcttactatttacaaggtttggttcggtttatattgtttcataaataaaagtattaactaatgccttcttgtcaaaataggattttgattttagtaaaaattcaaatattcattaatagacaaggaggaaatggactatatgtgcccaaagggtcatagaaagaagacagaattaaaaataagattttaaacaatatatgtcttaaattcttcatgtctcataaaagcctcataatttgcttcatattggatctgattctatccctcaaactatggagtctaaatctgatctttctagcacacgccacatgtttgaagtcaattaacgtgccttggttgtgaacatgtatttaaggtaaatatccctaatttctttaatgactcttcatataatattttctccagataccttcaacacactctcctgtggacatgtggcagtagtcaaagtctctcttaaaatgtgttgccaagaactgataatggtgctctaaaactggattgatgagtacatagatcaataggttgttactatccttttttgaaccttacggttattcttccatatcacttaagaatagcttttttaatagtcacatcacaccactatcaactcatactgagcttacagtcaactaaaactcttgtgtttctttcatatgagatactgtaggtcaggcctctgagatactgtaagtcagacaccctaaccttgtgttactattttaaatgtaattgcaagaccttattactgtccctatttcattttatcttgatagtttcctagagccagggaaattttttttaagtttgttttgacgtgatttttatgttagctggcacatgctcattaaagaaaatttagaatgttaaaaaattaaatatgatgtatcttcaaaattaaaatttaatatcagtaattatatcattcaaatataactaataacagcagtttttatatattctcattcttcctatgtgtatagttatgctatatatacagcttttaatgctgttttaaaacagacttagaagcatatcatatgctgctatatagtcctcatggttatatatttattacctacacaatattcaatgcaatgtaaatttgtgtttgtttcctttgaacagtgagcgtgcttttactattataaataacgctgtaatagacatcatcatgcaagaagttttatctgtgtttaagatttgtcctcttaggataaatgctcagaaaagaaattactgagccaaagaaaatgaattctaaaaatgtcatttctaccacttaattagtagtaagtgtggagacagacaatgcatagacaatatgcttagcctctaaaacactctttacttctattttcattacacatgtaattacttcttcaatatgcgccttcattgagagcgtatccattaggattcagtccaattgaaagaacaaaggcccaggatcacaatggtttaaacacaggaagggtttctttctcctgtgaaagcccattcaggtcagtctagggatgatctcgtggttccacttcacacagctgtcagggacatgcttcttctgccttgctgctccagcgttcctggagcattcctgggtgggaccttcatgctcatggtcagagatggaagctagagttccatcccatcaacattccagggggcagtgtagatataaagaagcaaaagcttcagctgtctctttaaggaaaattcctttaattgctacacaaattctgcatatatctttttagccgaaactttctcggatttacctagcttcaaaggaggctgagaagtattatctctattctcaggaactatatatctggctaaaaatcagtggttctcttcttctggatgaagagaaaaatggatattgggggattacaagccgtttttgccatggagaatagatggtgtttctttctgtttttaacctcaaaacctcaggacctaaagacctaggtcaaaaacacaaaatgtgtaagatttctgaatattttttgaattgaatttgcagttcttttaggtgcattttcccaccagtcacaactttcattatgccacttgagccatttatttctaaatccatcctgtaacttaaattctgatggaattcagagaagatacaactcagcaccagacaactgtttttagccagtattgctgcagcccaaatctataaactgtggggtttgtattctgttccatatgagatctaccaccacagaggaagtttgtttagaaagcattgtgaattaaaaatgtatacagagttattgtgtatatgtgtatgtagcacaaaagtagaaaagtgatgttctccaaaccatggaagctagggagagccccactgaattgaattagagtcatcattttcagtaggttttatacaaacaaaagataaataagaaattgggaggccaggtgtggtgactcactcctgcaatcccagcactttgggaggccaaggtgggaggattgcttgagttcaggagttcgagaccagcctgggcaacatagcaagatcccatctctaaaaaaaattacaaaatcaaaaaactaactgggtgttgtggcacgtgcctgtagtcccagctactcaggagactgaggtagggggatcccttgagcctgagaggttgaggctgtagtgagctgtgattgcaccactgcacttaccctgagtggcagagcaagaccttgtctcaagaaagaagaagaaaaagaaacaattgggccatttgacttaaagagcctaagaatctaagtgggtatttaaaattacccgtccattattcaaaggcatgaatgtttgtcagatgtgtgttcacactttttaaaaagattatttgctttctaccccctttaaatttaaatacgaagaaaagaccaggggcagatttctcatccctggaataaaaatgtcagttttgtcagaatgtgaaaactttgacaaatgagactgtagcttgctcagcggtttcaacacatgtacaagggtgcttggtaccagagtgctcctcacctgttcagtcatctgcagtgagtgacctgacacaaagtttgtaaatttaacttgggaagagtgataaagaatacagaaacctgaagtatataaatgaattggaaaccaaattatattttttgacacttacaaagaaaagatactcatttgcctggatttgaatgtatttagtttctgtcaaatatatatgtatatcatactagagaaccatattgctcaatttctttccaatttttctttcaaagctgtaagagcaaaattcacaaccctaataaggttttagaaataaagaacattttctatcttccacctgttactgttacaaccatttaagaagtggagtggaaaaaaaaaagaaaaaagaaaaaaaaataaaaaataaataaaaataaataaaaagtggagtgaataataaatctaaacatttctatattttgctatttgctacatttctatttcccccaactaccatccttttcatttatttttgtttttaacttcagcttattatcatgattacttcataccagagtatacaaagcttgactgatacgatttcagaaaacaatgtcattagtttgatatattgtgaaaaaaaataccttatagtattgaaaactatactgactaatactcaaagaacatgacctttcaaaattagttttcctctttaccaaaagaaggagagaggagaagaggtattcctttccctaagccataggcgctcttgagattttttgaattttttcaaataccagacaccatgcattttcatacttagagtacctgttctggtaatctgataagcattcattcagcgtagcttcctatcagtcgagtgtttggtttttatctagctgtgattgttttttttttccatttgtatccagaaatacaacacttagtagattatcttctaagcatacatggctgttttaaaaaatataatccttttttctacaaaacaaacctatccacatttctccaccacatctcacgtttttcggggttctcaaggcaaaactctttttactgtgggtagaacagatagaccaactgacccttggagttgctttttaaatgttttttaagtttctacttgagcctagcataggaagaaaaatgcagtgactgcagccttattctttcaaaagttgttgtaaagaattcagaaatatgtctatcaaaggatatttgggaagactaacttttaaagtaagtgaagcataacttacaaggatgcagagataacaagaggcttaagtgaaatgaggaaagagagaacgtcttacattggatgcggttctttctcaggcctgtgaattgtctgtatttctttgaattttaaacttgtttgaattattcctttattgctgttctcagccattacattgatctcggagaagcaagcagggcagttaaactctcgttccaaagtagaactgcctgtggattgattggtagtaaaggcaaggtgactgaaaagggactgtgctttctttcttattgactagaagtgtgtctgtccgattagtctgtgccaagtacagaaatagcaggtgcacattgttgaaggatgtagcaactgaggttttgtgcttccagggaggccaggaaaattcctgccccaaatttatcaccactggattgtcgattatttttcagctctattgctgatgattcactctttttgacatttcaagtcagctaacaaatatattttaaatccaatctttatgcgtggccctgggaattttaaaggattcaaaaattaataaatatggagctctccaggaagtttgaatctagatgatggacagacactttcgtgtataagaatgtatgttgtgtgatttcttcaaaccaaacataagaacaggttcttattagaattagaagattctaatttagaagaattagaataagaattagaaacgttctaacttagatttagaaaggttaaatatactagaagtactaacaagaacaaagctgctgttgatttttattgtacaaagctagattcaagataaactatgtcaacagagctataaataagaaatttgtagtaaatattaaaggtcataatgagggtataagtatgtatacccaaattctattgcacaaaaacccatatagcataaattaaaggaaggttaaaaaaagaaactgacaaacacaatggtgattataggctttaattaacctctgtcaaccccccgcccaagacagattaagaaagtaagtaaccttggctgagcatggtagctcacacctgtaatcccagcactttgggaggccgaagcaggcagattacgaggtcaggagatcgagaccatcctggctaacatggtgaaaccccatctctactaaaaatacaaaaaaattagccaggcgtgttcgggaggctgaggcaggagaatggcattaatccgggaggcagaggttgcagtgagccgtgatagtgccactgcactccagcctgggtgacagagcaagactccgtctcaaaaaaaaaaaaaaaaaaaaagtaagtaaccaaaagatgtgaaaggaagaaaagtaagtaaacaaaaagatatgaaagatgtgaattattagtaaggattacataatatggataaatatatatatacatatatatgtttatacatatatgtatatgtgaaatatacataaatacaacatatatatgcatatgattaaaacctgtataacagaaaccatttttaaacttgcttagaaatttacaaaatggactactaagtgacaaaaacattgttttagccctgaaatataaatacattctacagtctgacccaatgcaataaaatacaaaatataatcattaacaaattcataactaacatatcctcaaaattaaaaaatgtacctttaagcaacttttaaatcaaaaggcatatttgcacattttaagaattgaaaaataatccccgcacacctccggatacagtatatgtagcttttaatacttatatttttaaaagaaaaaggatcagtttttaagtcaagaaggcataaatggaataatacagtgaatataaggaagtcaaatgaaagacacaaagatgatcaaaggagaaattgtaaatcacaaaattgttaagcagtcaaaaaacatttgttaaaaagagacactactggacagtgagccatcaagaaacaaaaaaaaggagaaatcacaagcaagtaaaattagaaatgaaaaagagcgaacatttacattacagattaagcgaatgataatttgcaagtgtctaacaaatgcacttcaatctctaagtatttcagcaggaatactgcactacggagtagactcagacttatgggtttgattcagagtaacttaatgagagcagaattaggaaaagatctacgactttgctgagattccaaaatattacaaaaaggaatataaaatactatattcataagtagctgattcaattaaaatatttttctacccttccctcttgaaatggctgtgtcatttttaagaagaaagttgcttattgagaaacactttttcattaggaaaatgaattcaaaaatcatataaaattgcatatgttgtgattaaactgtgtaaaataatcacttatgtgcataaaggcagaaagtgggaaaacataataagatgagaggcgatttttaaattttccagcctttccagaatactgtttatgtaataataaaaatgcagaacaggccaggcacgatggatcgtgcctgtaatccctgcactttgggaggctgaggcgggtggatcacctgaggtcagatcgagaccagcctgaccaacgtggtgaaatcccgtctctactacaaatacaaaaattagccggccatggtggtgcatacctgtaatcccagctactcaggaggctgaggcaggagaatcacttgaacccgggaggtggaggttgcagtgagccgagatggcaccactgcactccagcctgggcaatgacagagtgacactgcatctcaaaaaaataaaaaaaggcagaaaaaaaataaggtgtcttctgcatatgaacctaagctgttctatagttgttctcctggtaaagggacaagtacagtctacctatcattatcaaattgtaaatgtcaaattgtatccaattatttcttcattaagccacctaaaatgaaccattctctcagctgaatgtattctttttggttgttattctttaaataccaagcattacgacagttcttagagaaatcttcagtacaaactcagtttgtacattctatgggaagtcaaacacctttcttagtaaattaacagactctacctagtgaagtacttccagcatcatttattgaattcacttaagtaaaagggaccaagagagcacattagctactctactagagatgacaaatcttagaaatgattctgactttggaccttcaaggggattacttggggtggctgtcagactgttgagtcactcagacacagagagacttcctaccatgttcctaagactgtctcagccattgcataaatacaatgatttattttggagctagtaactgaattgctaattttaaaatgtcttaggaatttgttgaagtttgcagcggtactatgtatcaaaagatgctatggaaaatctccattgctgcctgtactgtgtttttgtgagctaaacttatctattttatgatagaaaaggaggaagtattgtcttaagttttgcctctgtttagtgtcactaaaacttttgatcttaatgcttagatgattttggagagagttcttccagaattttttgcaagtcattaaaaattatatatcatgtcaagaattagatgaattgatgacaactagggtgaaatatgacctactttatgtatatataaatatttcaaacactgtattcatgtggaaaagcatagattattttgtttctttaaaattatttttacttaggaggggagtcaacagcttaaggtaatactgctttaactttagtaattaccacaaagtctctagattacaataaaatattatacagcacattgcctaaagaaacacatactattctattactttctcactccctttaaataaaatcttcagaaattctactgaggatcccaagccacttatagaaccatgtctttgataaagagctgcttgaaaactaaatacattttaaaataaaaatttatcaatttgtataaaaattacattgttgaggtaatgaaacagtacagacacataaaacatacaaaatggaggtcctatcacaatctaaccacataggttaccacttctaacatttgacatttttcttcctagaacttttcctatgtctatatatgtatatttttaaccaaaaagtaataatgaacataatcttccacacttgctttttccacttaagaacatattttctgtcttttaaatatacagtcttatcttacaaatgagatctaactaattcatttaatatgtgcatagaattatgttgtatagagctacggtgacttatttaactagttccaatatgatttctatatggattatctaggttttttattacagtgttgcaatcaaaatccttgcacttgtacttgtatttaatataaatagtcaagaggacccaatgtccagatgtaggacagctggatcatggggtggaggtgaagatatatatatatcctcaaacttagtttttttggtcaatctagtgtagaaaatttccttgcaatttaattgttaatataattacttaattgttataggctttgtaaatttgtgtttttcaattgaccactctttgtctttgctcatttttcagtaggctcattcatcttcccatttattgaacaaattcttttctatcatttattgaactgtatgtattgtaaatgaatttgtactttgtcttctgacatggtaaacacgtgcttatttattttaccttctagaaactttgaattcttttgataatttcttgaaatgccaagtttagaaaaataatatagttctcatttatatttctatcattcagagttagcaatttcttgtttttgtttctagtccttttatttaacttaaataaatgaaacatgtaatacattgataccaaagccagataaggacacttcaagaaaagaaaactacaggccaatatcaccaatgagcatagatacaaaaatcctccatgaaaaaacatagcaaactgatttcaccagcacattaaaaggattattcaccatgatcaagtgggatctatccctgggatgcaaagataattcaagctaagtaaatcagtaattatgatatgccacattaacagaatgaaggacaaaaaccatgtaatcctgtcaatagatgcagaaaaggtatttcacaaaatttgacatcctttcattataaaaactctcaacaaattaggtatagaaagtatgtacctcaacacaataaaggccatatatgaaaaacccacaactaacatcatactcagtggtgaaaagctaaaagcttcctctaagatcaggaacaatacaaggttgcccactcttaacacttctgttcagcatagtactggaagtcctagccagtgtagttaggcaagagaatgaaataaatgacatccaaatcagaagagaagaaattaaattgtctctgaaattaaattgatctcattataagaccatgtcatctgtatagacaatttaatgttttatgttttttataaatagaaaacataaaaactcctccaaaaaactgttaaaataaatgaattcagtaaagttgcaggatacaaaatcaacatatgaaaatcagtagcatttctgcaccctaataacaaagtgtttgaaaaagaaatcaaggaaacaatcccatttacaatagctacaaaaaaataataaaatatttaggaacaaatttaaccaaggaggaaagatctatacactgaaaaatataagacactgattaaagaaattggatacaacacaaataaatggaaagatattcatgttaacgtattggaagaattaatattgctaaaaggtccatcccacccaaagcaatctacagaaacaatgcagtccctatcgaaatgcaatgacttttttttcccacagaaatagaaaaaacattcctaaaattcatatggaaccacaaaagaccctgaataaccaaaataatgttgagcaaaaagaacaaagctagaggcatcacaattactgatttgaaaacatttactacaaagctctagtaatttaaacggcacagtacaggcataaaaacagtattgcattttcatcttgctaatatttgcatattaaataactttatcaaactgtgttgttttccatagtttctagttgattatcataggttctgtaggtttgtcatctgtacctcctctctgattaacatgttatccaaatcagtagttctcatctgaggcaattttgcttcccatgggacctttggcaaatatctcaaggcattttttgatgtcactacttcagatcctactggcatctctgggtggatgttgggaggctgctaaacaacctgcagttcacaggacagcctccccacaatgaaaaaattatccatccccagtgtctctgatagcatagttgaaaaaccatggttcaaatattttgcccatttttattggattgttgatgagttgtaagagttctttatatactctggatacaagtgccttttaaaatatgttttgcaaatatttttcccaggctaccttttcattttcttaatagtttcctttaaagagcaaaaggtttcaattttgatcaaatttaatttgctgactttcttctttcataattcatgctttttgtgtgttatttcagaaatctttgtctaacacaaggtctctaaaacatcatcttgtatattccttttttatgtatttttacttttttttttttttttttttaagagatgggttctcactgtgttgcccaagctggtctcaaacttctggactcaagcaatcctcttgcctcagcctctcaaagtgctgagattacaggcttgagccactgtggccagccctttttttcttatgtttcttctggaaatgttatagtttttgctcttacatgtagatccatgatacatcttgaatttatttttataaatgatgagttaaggtttgaagtccatgtttttgcatgtggatatattatagttgcaacagcatttgttgaaattttttcccttgcctaccgaattgccttgaaatttttgttaaaattgttcatatatgtgtatgtgtatttctagactttctgtgccattgttgtatgactattcatatcctaataccacggcgtcttggttactgtagctttataataagtcttgacatcagatagtgtaaatcctctagttttgatctttttcacaatattgaatcttctggcccatgaacacaatattgttccatttccctgggacttaatttctttcagcgatgttttataattcttagtttatagctcctgcacatcttttgtcaaatttatcaccagttacttcgtatttattaaagttatcttaaataaccaggttttacaggctttgttattaatgctgtattagctcacatcaaaaaaagtaattgaagagcattttctctgtctttgtactctgtttgttgaagatttagaggaattaacaaatggagcttttgtactcaaaatgctttcctccttacttcttaatcaaaggctacccatttatttgaaaggcaacttttatctctctttctacatccaacttttctatacagtgccagtgtagtaaattttgtagcaattattctttctataattcatttggaaagcatgctaactcctaccattctttatatatttatattgaattacttattgaatgcagttaaacttactatgaagttaagcttgtgtcaccttctatataaatttcatacctcttgaggattttctttagagcccctaacaggatgccttatgcagagggtaaggaactgggtctaatgcttggatgttcaaagactggtttccatcagaaaccttaaaatacaattattcttctgaggtagggaaattgatttttagcataaatattgcttgtaatactcctggctagtttaaagattatctggcaatttactgataattattgaatcactatttctctaagacacatgtctggcagtaatttcttttggagacatgttagaaggaaatagtgaaataatatcagaatgaaaaatcagggcaagacagactgttaacattctctttcaacagaataaatacaaagtagcccgaaatgtattattattattattttcgagacgtagtctcgctctgtcgcccaggctggagtgcagtggcgcaatcccggctcactgcaagctccgtctcccgggttcacgccattctccagcctcagcctcccaggtagctgggactacaggcgcccatcatcgcgcccggctaatttttttttttttttttttttttttaagtagagactgggtttcaccgtgttagccaggatggtctcaatctcctgacctcgtgatcggcccacctcggcctcccaaagtgctgggattacaggcatgagccaccacgcccggcctggaaatgtattattatgctttaaacttgtaccaggtgcaatgaaacatagaaaaaatgcacattattcacttcacatagataatgtatataacctaaaattgaccaacgtatttaaagttttggtgtgtgtgatactggaatgtatattgctcctgacagaggaataaaccgggaccctactgaaaaacagtagaagactgataaaagactttgacttcgagaaagtatcttgacaaagaaagcctatacctttttttaacacttggataataaagcagttttgtttttttgtttttttttgttttgttttgttttgttttgtttgagacagagtttcactctgctacccaggctggagtacggtggtgtgatcttggctcactgaaacctccacttcctgagttcaagcaattctggtgcctctgtcttccaagtagctgggattacaggcaggtgccaccacgcctaattttttgtatttttagtagagacagggttttgccatgttggccaggctggtctcgaactcctggtttcaagtgatccacctgcctgtctcctaaagttctgggattacaggtgtgacttactgtgccctgcctaatagagcatttttaactaagggccagaaaaatgaacatgataggttagctggctagacagacacccagaaaagcagcttccttggggagctgttcagggttgacacaggcccccaccagcagagatgtgcctcgtcaggggttgggatgcaggtgggcacaggtctgtatccagacacaggtgcccagagggatcagaagccacataggtaagatgcatgccttcgtattacacatctctaaactgaggaaatccatttaaaaggaagattgaaggcacattttaagcagaaaaagaaagtagaaaggtaggatgtgttatctctgtaaggggcttcccgtcattttagcacctgctaatgaaggatcttttcctaccggttgcactggactctcctgccagcaacaagcaaaggcagcacctgacagggagtttgctggtggcctaaaatgtgggactccaggcctgaggattagtctggccactgatgtaaaaatgttagtcaatgtcacaactgtacaaaaagactagagggtttctatagaagttagttccacactggagaaactaatttggccagagaacttaagtcgttgatattcgtaataaacagaaaaaaaaaaaaaaaaaggatagtacttcgtagctgaaaataattgatacatttatcagaactctaaaaatccatgaggtagcctttagataaacagagtatatattattagagatggtacaaagtataatattagaggtggtactaagtatataattagagatggtactaaaagtcttgattatagcttttattcttataaaagttttctctactttttgtacatggtattatatattacattttttaaatgcctaaatagtgatttttttttcaaatagaactacttaaaaatttgctggtgacattatagtaatgatctatatatttacctatccttgtttttcttctcaagaaagaacaagctcttgtggtcctatcctgatgaagaattaccctcagcctgatggctgttgtctgaggttgagtacgaggaaaactaaacaaccactctcaactccttggtcataagcacttaatcaacctagcatgagttgccaatattggaatcctaccttttgtgtgttactagtacctttctagaggattacctacctgtgctggtctttggggacacattggagcatattttcagatagtagttttaaaaatcacttttaggtttcattccttcatcacaaaacaaaactttagagcccgtcttcttacaaggagtttaggttatttttcctcaagggcatttatgcatcaacactttattttagttgatatttttctggctattttcacatgcttataaacctgtattttaatttactctcatccgtttaccaatttgtgtagtattatctacgcagttgtggctgttttccagatctatgggcctgtttttcagattatttgtaaaataaagaaacattaatccctgtagaccaactatttactccttttgttcagagttgattgattctctcttttttttggaaggctcaaaccaatttcctgttaaaaaccaaaatctttatcccaaccatcctttaccctgatccccaactaccactctattccatgctgaagcaaaattcttcagccaaccagaaaataacaaaacaaaaaatacttctttgtagaaccttaacaaaggacttttaaaaatcaacacctgccccatacacacatacacatacacagcgtgcccacctacacatccacgcacatgggtttaacgaattctctcattacatatccttttccaacccctcaaataactcaagaattttactcaggtatttccattttgagtctgatttatgaactctccattgtctggccacgtgccagccatattccacaattcataatctgtcaccagaagtaatggcccatttccaaaggtgaagcatgacagtactgtctgcatgcatcagataaacagattgtgtggccgctccgtgttctgtctgaagtcctaggctgaagagcacattaacctttcagcacagccccattttcactgtggtggttcttttcttttatgctcttcatttttcttcataagagccaggcctgatgaataacacaacatccaatcactagtgagcagattgctcaaaacccgtagaaggtgagtgggtgatggtacccagtaaattttaaaacatctcaaccttccaaccttgttgtatgaaatgacttcagaaagtcattggaattaagaagaagattgtttttattttttggttcctcattggtataagctttttcctatgacacttgatggtggggaatctattggcaacctcctccttttcttcacgtctaacacaagactacagatggacctctgtcgtctaggatttacccagcagaaggattcaggaagaaaacctaacttagataggccttaagtacaaggtctcattttgtttcactttcgtgaacctgcatctgtgtatactgctgggatatttatgcagagatacaagatttccctttcaagattgggacagttgtaccgcaggggcattcagtaaatttggcctggtgtaggtcagtccagccacctaagcaggatcacagacaagtagatgatcctgaatagattcatgataggagtgggcacaccaaaatcatcaggaaccaaatgtggctcagataattaatgttcccatcagtataggaactatggtcattttaaaagttgatctaacctcatcagagttaatcatctgcatctgtgtgtgtgcatgtgggtgcacccatgtgtgtgcctccacgtgcacgtgtgtgtgtgcatgtgggtgcacccatgtgtgtgcctccacgtgcacgtgtgtgtgtgcatgtgggtgcacccatgtgtgtgcctccacgtgcacgtgtgtgtgtgcatgtgggtgcacccatgtgtgtgcctccacgtgcacgtgtgtgtgtgcatgtgggtgcacccatgtgtgtgcctccacgtgcacgtgtgtgtgtgcatgtgggtgcacccatgtgtgtgcctccacgtgcacgtgtgtgtgtgcatgtgggtgcacccatgtgtgtgcctctacgtgcacgtgtgtgtgtgcatgtgggtgcacccatgtgtgtgcctctacgtgcacgtgtgtgagttcatgtggcctatgtgttcaaactgcttcagagtgaaagtttccaagttttaagaagaaactgactgaattaaaaataaagagagcaggggcataaaattcattccaggaacgtggtaaccacagaaacagaagtgaggtgctctgaaagctgaaagggatatcagtcattggagatggggagtagggagggatgtttcttggtttgtttcttaataaagacccctggattgttcaagaagggaaaaggagatagtgagggaaaaagagagactaatggtgctagaaatggaggggctgatttttgaaagaatggccgagatcagcaggtctcccactggaatgtgtcttgttaaaatgcagattctcctctctagagctgtggtgaggactgagatcctgcctttctaacaagctccccagggatgctgctgctgctggctcacagattgcactctgaggagtaagggcatagaataaatgggcaatgaggagccatggaacgtaagaaaagggattaactctagatgagaaacaacaaacgttttcctccaatatctaaaagaaagattaaaaaacagaagtttgggcaagatggtgaaggacagaaaatcaatatggttttatcttccagtcccagtgttcaatatggaaggagaaaaaacttagagtgggaaattactatctacaaaacaccacagcccaaaacaatctcctgaggtgtcttttttctgttcttttttccccctttggtataggtatcatttactttggaaatctataatgcttctgttgtaatttaacttaccacatctttatatattgtctttttaactcttctacagttatctcaaaaagaaagttttagtataatatcttataagtagtagaagtcattaataattttttgattgatttagccaggaatcctgagttctggcttctggctcccaatcaatagtaaatcatgtagactttatctgcctccgtttccttacctgtcacataatactctttcctctccaccttctacactgctaggagagagaaattaggtcttaattataatgctactttgaaaaatctactcaaatttatagtggtcttcattgtagtcatattttatctcaacaactgacttttacattttatcaaagactttatattttctgtaaaatactacacagtaaatcttccggcctcactagaaaaaaatatttgcttacaatctactttctgaataccaaggactgctgatccgtagaggggagaatggagagagggccctgccagctgctgatttagctgtctccataggctcgctattgctcaagtactttttccatcacaaagaattggaattctatttaccagtacaacttttctgaacattttctagaggtaatatgcaaaaactgctgatgacacagagagtaaaaataaaactccctgtgatcaaatgtgtctccattaatctgcatctgcttcatcaaatacagattgtgtgtgcacacgcacacgtgcgcatgtgtatgtgtcttggtaaatgggtaaggagttaaggagtcccaatatcatctatactcttctcataacaagaatgaaaagaagggtctacactaccttggctaactggcacctcccatgtgctcagcaccaagctaaaggttgtgaaatactctaaaaacatgtaatacataatgtctgcactcaaggtacttagaatctatttgggacaccaagtaaacatatctaaaactagtcatgattggttaagcacctaccatacgtaagacagtgtgataaacacactcaggtgccaaatagcaagatatagccataaacgcaattaaggactcccaaactttaaggcctccacgtatcctgagtgaatcagagattactccttattaggcagggcaagtagtgttggtcatttagttcatgtaaatgatacactcacaaattttttaaaaagacaattctcaaggaatcaagaaaacatatgtgaacagcagagaaaatcaaatacgaaacatggagtcatcatagttccagtaaaaactcctctgctttatatttctgacttttttatataaataggctaaaatccatgctaatatatatgcagaaaagaaatgaggccttgctcattacctgcatatccttacatccctttcaaaaacctgaacatgtactctagcatagcattctgatctttattttcctgggggaaagaaggcttgtgactttgcgacacttagctggttctgtatccctctgtattctgcgtatatttgacttttctttggttaagaggtagaaggtgcttcttaggttttaaaggtaactttagaatgacccgatgaagaagttaaatgtctctttatgaaatagaaacatgaatcctcttttataaaacaaacataaaaagatgataaatatattaatcagattttatctccatagatccttggacctattagcacaatataatcacaagttgtatgcttatcacagccggtattgtttgatcttttttattttttgacagagaagcagaaggccttaatctctacattacttttagtaaagataaaattaaaatgatgtattgttattttgtaatttccttataagcacatattggaggattaaaatattacaatagaattatctgtaagcaaatatgttttcaaataaggctgagtgaacccttcattgaattaaaagactttaatggggccaggcgcagtggctcatgcctgtaatcccagcactttgggaggccgaggcaggtagatcacgaggtcaggagttcgagaccagcctgaccaacatgctgaaatcccgtctctactaaaaatacaaaacttggccaggcatggtggtacctgcctgtcatccaagctactcaggaggctgaggcaggagaatcacttgaacctgggaggcagaggttgcagtgagccaagatcgcaccactgcactccagcctggtgacagagcgagactctgtcaaaaaaaaaaaaaaaaaaaaagactttaatggttatgttcaaacttgaattcctcattttaattaaccattagatggttaaatgtttaccattttaaataaccctcctcaacttatttcatttatactgaaataagtcatagtactgaaacaaattatttataataaaaatacaaaaagtgcataatattcaatttgccaaaaattaaagaatttaaagcaacagatatttgtaattttcccattttggtcactgaacattcctacataaggtaatacttcactctctgtatcttaaataagcatttgagggatttaagaatatttcctaactacaagggctttcttattgtcaggagccattactgagggccattactctttgctttgatctcttcatcccattatagaacaaatttattgtgtgcctattatgttcagcactgagaatgcaaagataaataagatttagcccctgcctgcaggtgctcacactctattcagtaaagctcaaatttggaacagagggaggaataaggatataatggatgtatgaagacattcacataacattttctgcagatatttttgacacattttcctgtgtgtgattgcctgagagctttctcagctatataaatgatacctaccatgagttcctattgtgaatagatttcatatccctcatttatgtgtcaatgaaataatttttctgtctctatggatttgactattctgaacatatcatacaaatggaatatgtggccttttgtgtctggctgttgccacttagcataaaattttcaaggttcacctatgcattcctttttctggctgtataatattccattgtatagacatactacactttgtctattcatgtatcaatttatggacattggtggtgttttcactctttggctattacgaataattctgctaggaacatttgtgtacaggtttttgcatgagcatgttttcagtgctcttaggtgtatacctaggagtggaattgcggggtcatatggaaattctatatttaacttttcaaggaattgccaaattgttctccacaggggctgtgtcattttacattcccactagttatgtattatagttccattttctctacatcctcaccattttccttttttttaaatagccatcataatgagtgtgaattagtatctcatagtggttttgatttgcacttccctaatgattaatgatgttgagcgtcttttcacgtgcttattggtcaattgttttgaggttttttggaaaaatacctacccatattctttgccctttttaaaagtaggttatttgccttttgtattgttggcttccaagagttctttgtatgttctagatactagacctttatcagacatatgatttcaaaattttttaatgtggactgtcttttcacatatttgatattgtcctttgatgcacagaagtttttacttgtgataaagtcaaatttatttatttttttatttagttacttgtgattttctattcttttataacacatttttattgaagtaagatgctgtttatattttaaattcttctttgctataatattgtatttaattacaaaaattatttatcagtctcaatttacttctgatccatttggagtgccaaataacagccaaagcaattgtagttataaattaaaggacacaattcagcaaggaaaaataaattaaaagaaaacaaaagcatattattcttttacttttgccattaaacaacaaaaacatttctgataatttgtcaaatatttgtcaaattgtctcccagttatctgtaatgtagatagccttcctggtaacctgtcttaaaaataaatgatgtattcgtttcctgtggctgctacaacaaattaccacaaacttagtggcttaaaacaacacaaatttctcctcctacagttctgtagttcagaagtctgaaatgggtcttgctgggctaaaacaagatgtcagcagacctttgatcctttctggaggctctaggggacaatctgtttcccagcgttttccagcctctaggccacccacatttcttggcttttggttcttctcctctatcttggaagccagcaatgttgggccaagtatttgtcatattacatcactctcacttcctcttctgcctccctctttgacttttaaggacccttctgattacattgggcccacctggatagtccaggatactctccctattttaaggtcagctgattaggaaacttaatttcatctgcaaccttaattccccatgtgccatgtaacatatatattcacgggttccagggattagaaggtagacatctttgggcagctcttattctgtgtaccacaggtgactttactggtgtcctgttgtactgaagctagggactgcagtacatctgttgacaaatgatgaatttgaaagtactcaaaaagagagagagactataggtaactttgttcttgcctttacaaccctttttggataggagcacagaccataaaggcagggaaattagcagatatgcatgttattgattcctgattataatggctaaactagacgtttctgtttttccaatactagaagaaagcagcttagaaatttggcattatggatagcagtcttaaaactccttttcttaaaatggagcttacggacaggggctttctgtaaaggcagcatgtacagtagagtgagcagaggctttggagttaaggggaccagggaacaggtttcagctcatccaccgtattagaaaagtccaatattgagatacagaattcaaccacatccccccaaaattagattttcatgaataggtacaaaactttatgtagtagcatatctcgaatatctctaacacacagattgaaacttttttaaaatgagaaaaattagtgcttaaaatgtctaaagtagtttaaagacatttagttatgctgtttactaaatggtaatggctttaggaacacatgttagatgcatgaatttaaaaatcaatttgttcatgtgatgctggaaataaaaggattctccctatccagtgctgttagaagccaccactaagacgatgacagtgaattctgttaggccttttccttgattaaaaggaaagtgagacagcagacaggctgacttgtttactgctaagcttcctatcctggctctcctgcccacattttcttttctaagtcatctattgccacatgtagacagaagggggaaaagactctaatctaaaaatgaatagagtagcatgtcagtgctcccggtgatgtacataaaaacctgaatttttctgtttctatgtgcatcaggctgtctcttgccctaggttgtctggattgtaaaaactaagattattattaaagagggcagcaagccatttaggaagtgccctgtctccctgtgacaaaagctttgcagctaagcacagtaatttatgttgataaattgcagctgtcagagtgttcacagtgcttcatgggatatgtttctaactttgcatttcttgttcatgcattccaatatatggacttctctttaaaaaataaaataccagagcaagtcttcggaagtattccctaaattgtcacgacctagtttggataagattaaactaaggtaaaaatgataataagataataagaatgattattatgagtgtattttttttttcttttcaaagtctgtaaggatcttaaggtggaaagaaatgttagagaaactggccattatttgaaagacttaagtttccaaggaaagaaaacaaaatgtcagtaaagtggaaaaattggttccaaagcacagggaaatacatacatattaacaaaacaggccaggcacagtggctcacgcctgtaatcccagcactttgggaggccaagacagttggatcacttgagctcaggagttcaagaccagcctggacaacatggcaaaactccatctctacaaaaattagctgggtgtggtggtgcacacctatagtcccagctaccccggaggctgaggtgggaggatcacttgagcccagcagtgagccgagactgtgccactggactgtagcctgggcaacaggccaaaactctgtctcaaaaaaacaaagaagaaaaacaaaacaaaacaaaaaatggaaaggcaaggtagttaaaaggttactgaaaaaggcaatggaaagggcacaaaaatagaacagattaagttctacatatgacggtgtcatgcctagtgcaacaggaaaaaaaagtgatagataaaatctacattcaaataagagcctccaagcctcagttctaatccctgttttgccactgtatccattagctgttgctacaaagatactgtgtttcatacttcctcaaagctctgtggtccataacagtcatttacttgactgcagggcagtgcaggtaagatttggttcatctaaagctgaacttctgtacacagcacctggtgcgtcattgctctgcctcttaaaatagatgtttgggtgtctgactggccatgctctttaagtctctgtttggacttggagctaacttcttctcaaggcagtggcaaacacttaagacagcaagcagaaacatacaaagtccccaaaggcctggcttctgacctggcaatctatcctctttggtcatatacccaaatcagtcatatggccggccccacatcaagagacagaggagtacacgctgctcacaaagagaactcctgagaaattggacctaacgttgtacctaagaaagcctccacgaaagaaggataatatagttaaattgatattcttatttaagtgaaattcttgaaactctaggtcttcaataaacttcaataataatgcatcagaaatctcaaccgaaggaatggatattctagcttttaccctctacactccattccctaatttttatactcaaaaagtgatcaacttgtggaaaccacattacttttattcttttcttaaatttgtcagctttcacatatagctgtagatatttgaaaatatttgttggagacatgagtgaatcaagctatcttagtcacaagagctgagctcagtgctttcccaaccaagagctcccaaactgaaccattaacaccagctagacatttccaaggtatcagtctcacttgagcagttgacttcatcaaccaacataaatagttaaatgctttcaaaaaaaaaatttaaagtctgggttttcactagcaaaggattagtagttatcatcttagtagggcaacagcctattgaatgctcgatgcaaaaagcattttatttcaattcctactagtatgctgtatcatatttgttgaatattcccaaaatattgtttaatccaaccactccttataaaaatgttatgcagtgactctctactgcttaatagtctagaattcaaagacttctttatctggttctttctatcctcatcaatcttgtctcttgaaagacagtgccactttacaggatcatcagtattcgtggtgacatttgaatgcatgttgtggaatactactttaatgggaaaagtttacaaagctattggtggagcatctcttctccctgtatttcaacatccaagaatacacatttttcacagaaagcagttagtagtacacagtaaatagcaattgctttaaaatgagtaacttttagtaggttttagggaaagactagaatagccagaggcaagaaaaaaaattgggaagattacatatgtgacagtcagatgtatagacaaacttgagtaagtcaccgttgcttacgataaactttggttccaatcctcaaattcaaaagtagattgaaaaagaatgtattacccataattgcaaaaggtggtattctcatctagactaagtcatggaggccgtacatgataaaggacttggtaactgctaatatttatgcaaatatatttgaaggtggtatgattaatgattctttatgtaaatgtcactaacttgtaatgtgtgtttattcattaaatcttatattatctaaagaaaaaggatttgtatagcaggataaacaataggtcatttaaactatttggataaacaaattatctgaaagaattttagggcacatttactttcttaaatttattgataattattcaaattaatttgttatagctttctgtagctcagctccacataccaaaaattggtattcacttatttttctctgtttttaaatcccaaaccatgttctgactaaacattttgtattttcagtactgaataattaagaattattagtaatgagattcaggtcatttgggctaagatgcattgtggctgtgcctgtgcatgcaacctgatttgaattatctattttgactccttagattcctttttctgagttgatttggttggatggactaactggacttgtcaagataatctaaatcaatttgtgcacatatcacaaacgatcaaatttgtttagctaaaacatttctgttggtgacacgaagatgatagagatttggttcatgttgcattggattcacctctccttctcccactgaagtttttctggctgcggtcttaaataatggaaaaattagagagatgaaatggggcttggaaagtgaatagggttgattgcttggttgtggatttgtgttattttgtgattatttttaatgcctttctagacaagcctgcaaacttctacagggtattcaagggtagttgctaatttctgggtttctttcatgagaagtggtagaaatataagctgttaccaatactaatttctgaggccccagggaattgccccatccaggcagtctggcctagtgctccccacaactatgggagctaaatggccaactcccttgtacgtttgtacagacataaagatcttagggtttgtgtttcactaccttgtggcaagcaccctgcctaaataggtggccttgatttttcttctctgttattgctctaatgactcctaacattgattgagagggcgataaaatcctcctgcgaagtagaacttgaaatgacagtcctccatcaggagtattgggataatgtcagataaattactgccgatcccatgcgctgaaaaaaaaggtaatatctgagtgtttttttttcttcaccaccaagaaataaaaagatcttcagaattgtcatctagcctaaactttgagtcacagtgttaacttttgttttagtttgagtcaagtgccttttcttagagaaattatatcatattaggatgacattagagcagccatgtggataaaattctagtctttttcccggttcagttgtaataacgtttgcaagagaaggtggttgaatttgctgccatccttagcatcagactatatacaaggataataacatatcactgctgcaatctgagtatctacagttcaagtggaaagaaaagacatacaaatataaataattcaaagtaacatatataaaaatagttttcaagcagctcaatgtttcagcatactcattgtcattcaaacagacttggggtagggatgaggggtaacagaggatatacttttctctatcctacaaaattggaacacacaggaaaatagacagaaatatgaaattaaatgatcataatttgcccaaaatcttctgacccaaagacaactactgctagtattttggtgtttagtccagtcttttttctctatatatgttagatttcttagagaagaaactcctatttttaatttcataacgtttaagtttgtgttcttggcttttctttgttgttttgtttttaaggagcataattattcagcaggtatttactatgcattcctttgtggcagacatgatgtcaggtactgagggtctagggggaggctgctgctgaggaagccaagactccagcagactgtcacctgctcctgagcccacagtctactgcaggcctcagcctatcaacagggaagctttctctgctcagtacattttttaactcaaatatatgaggctttacattttccagttaaacattctcctgttactttttaaaaatatataacagctttattaagacataattcagaaaccataaaattatttcttttaaagtgtacaatacttgaatcttgattctttgtttagtttctctctcctagtacttttttttttttaagttccagggtacatgtacaggatgtgcaggcttgttacataggtaaatgtgtgccatggtggtttgctgcacctatcaactcatcacctaggtaggaagcccagcatgcgttagctgtttttcttgatgctctccctacccccgaccctccccagtgtttttctattgaagatcagattaactttactggtgttcttccgagacagtgataggtagttgaatgaggtagtctaaggacagactcttgccccattcaaggccattccaaagagccactaacgagtactctttaggaaaggtatttgatatctcaaaattcatatgtctgtataatcatttagcccatacttcaccgtgttattcttggtaatatacaaaatagtctctgaaaggcatatcatcactcgagagtaatagctggaaattattttcagtaatctgagttgaggaaacagaactttatttatttttgagatggagtcttgctctgtcacccaggctggagtgcagtggtgcaatctcggcccactgcaacctccttggctcactgcaacctctgcctcccaggttcaagcaattctctgcctcagcctcccgagtagctgggattacaggcacctgccaccatgcccggctaattttttgtgtgtttttagtagagatggggtttcataatcttggccaggatggtcttgaactcctgacctcatgatccacccgcctcagcctcccaaagtgctgggattacagatgtgagccaccgtgcctggccgagtaaacagaactttaatatcatatcacgtatcttgagttcaacttccagtgtacaacacgtgagatcattttctgtgatggagaatgtgagtgccaagtaagtgtcctggagttgatgtcacagcatcttcttcaggcagaaatcaacgcctttgcttccagcatagctttgaagcccctttttgttattgaatttggcacattttgatactttgaccttccagatctttagctttcctgtttttcccatcttttaacatattcacttgaactaaggaaacccttccatttctattttccaatggtgagcccgtcctcagagttctgactatgtaatagcaatatttcatctgttataaaatgtagaaccctgttgtttggaattttaacatgctctttgttggtaatagaggacctcattggttgggagtgctctgagctagccttcatgagaatgccagaatatcctcatgacctcattgtgacaaccagaaatatatcacatccatctatgttacctgcattttatagtttatctgggtgatttttttctttaacttccaaatttgatttttaagcctcttttatgtagtttacaggtttcttgccaaatattttacttgtattgcatttcaagccagaaacccaactgagtctgcacttagtgaactctttgtttcctatgtagtctctttttgcatcttgcattccagcataattatcttttcttaaaggcaacatcattaaagtaacgcagtgtccatgcatcctgttgtatctctgttcttacactaaggaaagatgtctcctagttggtaaaaaagtttttaataggatatgttggcaaactggcagctaccttctggggattttttcctatgcatttaccaatatttaggcataatgagaaatagatactaatgcttttattttagtagagatttttgaggagctcagaaaattacatgagtactgttatagtgtagtataaatacagtatctcacttcaattttctcccttggctcagttcccaaaaattaaagggagttcctttccttataatttgtgttaacaacctattgttcctccagctgtctttagctcctctttccagcataaattgattccagtgggagagaaggcaagatagtaaatcagtgcatctatgcttttacttccccttttgttctgttcaactctataattatacttcatttttgtaaagcagcagattttcaaatttaaatctcatgaatttcaatatttatacatgtacgtaataggaaaaaggacttaactgctctccctctcaattcacacctacaaactaatatttgctataataagataaaggcaaatccttttctgaaaaaggtgatagggattaccaagtaacattgtctataattttaccttttcagaaatggatgagtgaacatttttgagaaagaggaagtaaaaatatttttttcttattcttccctacagttagtatgacgaggtaaagccctctagaggccttcagatctaggaaaaatgcccctacctgctttaaagccccagctaggccacagttaccagcaaaaataattatttgggcatcactgttatgacctctctgggcacatttaatcagtcagtatttatggagtatatttcatgtgccaggcactggtttaggtggtagaaaaatgataatactcaacatatattgaactctttttcttataccaggaaatctgctaaggatttttcaggatactttcctatctaatactattattatttcagagggaagaagcaaggatgaatcttaggtggcagaacagatgtctgtccttcagggggagatttaacctctgtgagctccagtttccaaatatgaatcacattaataatacctactttatcaggttgttgtaatagatgacgtaattcaggtaaagctataagccaatgcagaactatttttaaaattaggaaatccagagaagtgaggctctactccatatcagtcacagttgtaggcactgagaatacacattgcactgagggaaaatgaagtcactgatgatcttagtagttttagtgcagtaatagaggtggaacctacactgcagcaggttatgaaatgaatggaaattgaagggtagataagtaattccagtgtttgggctctgaagtggggaagagagagagattgataactgaaagggacttggagtgggagagagagtaaaatggaacagccttgaacacatctaagtgttcatagaaataaataagatgatgagaactgtttgaaggaacaggagagagtgatgataatctgtagatcaaagctgtgagacagtaagggaagtgagatccagaaccctggacagaggagatgtctacatttctattacaaccacaagaagggaggaattgactggatgaggctgtagatactggcgtgaatgctgagaagatgtggagcaagttcttattgggcttgttttccctgagaagatggggtaaagtcatatgctcaaagtagataggcattaggcatttggaaaggtaggaggttttagtgtgtaggtttttaaatagtagctagcaagaacttaataattaactaggaaagcagaaagattgacccaactgtggatctagatgaagctgagtgcactctctgtatccttttttatacgcacagtggtgataaataaagacaaaccaaaagagaataaatcaaggctatttattcagtttcttgcagagtaactcatttcagcggagattcaaaggcagggaaagaaatgggaatgctgtgtagtggagaaagggatggcttctgatgtaccctaattggagtctgttggcccaaagaagctgcaggcaggctgactggaagcaagcatcctacgcgataggttagaggagcatatttggctttctctggttggtgctaaagttagcagtggagccaaaaattagggaagttgtcagctttcagttaagtcatggccatttggggcaaattgttgcagaaattattgtttggttttctgtgttctgaatccctgcaagtctgacttatcgtgggctgatttcccaggctagttgttgtagataagggattggtttcctgggcacgtttctacagttttggggtcagaattctattttttatatgatcttgccattgtccatttggcaagatcatataaaattgtccagataaagtttcctaccacttttattattattattgaaacttgaaatgaccttctgtttagaaacccttgttcctttagttaaaagaatatagaatctgagagacagatgagactcaggaaataatcagtaatggaatggaagtaagggaatttgtgggaataccattcaagaaattaacatgtaattttaacctgcgcagtaaaggaaaaatttaagaaactgcatcaccttgttttgagccttggtcaaggtaaacccaagctatgtgatatggtttggctctgtgtccccatccaaatctcctgtaaatttgtaaccccacgtatcaggggaggggcctggtgggaggtgattgaatcatgggggcgaacttcccccttagtgttctccacatagagttctcacaagatctggttgtttgaaagtgtgtagcacttccccctttgttctctctgttactgccatgtgacaaaggtgcttgcttcccgtttgcccttctgccatgattgtacatttcctgaggcctcccagccatgtttcctatatatcctgcagaactttgagtcaattaaacctcttttctttataaactacccagtctcaggtagttctttatagcaatgtgagaatggaccaatatacttgaaagtggaacttcaggccagatctctcagaccaatggactagaagatagagacttaagaaataagtgacttgcttgggcttggacttgaacccagtgctcattcattttcattgacctgagaagtaaccattacatcaatcatgttgaaaatttctttatcaaatttggaattggaaagtttgagtaatgcaaaacatcgacctaaacgcttcattaattactccacagagctgtctaaaaccataataaacttacctgttgttcattgtagctgtttacaggcttaagaaagtttaaggagaatgtaaccttataaatgtttaaccataagggatgataaatgttaggattaatggtatgtcagagtgtgcatatttttaggattctatgttgagattggagaaattcccgttactataaaatatttgaggggcaatttacctgataagagaaacaagggtgtattaccattgattgattatatagtaaacccttaccttgtctctcttcacataatgaatttcttttttccttacagcctgataagaaaatttaatgggatgcttccatcagtaataaaaccactgagccatatagaaagtggtttttgcatctttcccaaagtgtgggaaataccttgatatcagctggaaagagtcattacttccacattaaagttgtgctaaagtgaaagcttaacaagcacttagtttatcagaaacacagtagcattttccaaagctccatccatggatgcattgtattctaagggtgagaggtaatctgaagttgctcatgatctcaaagggcagggagacctatgaaaagggaacaagtgggaaacaaggatctagccattgaacccagtgttccttttccccccagtgcttctgaacacacccatataaggtgccctagaagcaatattaaataattctggaaagcctgggagtggtgtgcttcaatcagcaatcaccagttaaggaaatgctgagttctaggaaaggggcctcctttgaagtcatttagagacccttgaccagggagcttagggagaataaataccaaaggagtttgggtttttttatgtcttggctgtctgggtgaattatctgagatgtagacccagggcctggatgaaggtttgcagagcagacatctttatttggatacacacttattcattcaataaatatttacagtaagtctgctatgtagtaattgtaatctataattaggatattttctttgagtatgctaaatatacaggaataatagagaacagagcaaacctggtctctcctgggctcacatgattctgagtaatgaacaaactgtagcaataatactcaatattaatacttttgtttaatgtaataactagggtgctacctttatggaattctctgtttttaatggaatttctcaaattggcatactgttttctactaattgagaacaccccttgcataactgtaacatagccttcattgttttttgtttttttaatctctaaacaaaatgttttatttggtagaacagaattgcagttgccctcattctttttaatacagttctttactaataacaccaaggccctaattttgcacacacacactgaacccttaattctgcctaggagccctgctggtagttgttataatgccaaagtcttgaactatggaacttggcaaatctgttaccataatgaattagtaccaaaatgattggggtagcacattttagcattcttattgaatgcttgcttattccaatgtttcttacctttattaaacccatgaatcttttttttcttttttactaaacgtaagatcacacgtaatatcagaatgttcacaataaatttcgtacttagaaagtaacacaattataattttaggattttttttcaaactatatatacaactccctactcttaagaattactcttgtacataataaagcatttgaatgtctttgtagattatagaaacttggcctttttcatcgtatttacaaagtgttaaaacatttccagggagtagaaagggacagagatttcaagcatcctaaaatggcaattaaagcaccaagtagaaattttctgtagtctttgaaaatgagacaggattttaaaatgtaatatttttctttctcatggtaattattatcatctcttaagcctcaaatgtcataaattagctatactggaggaacctaggcctgaagttagtctgttacttttctattttcttattatcctcttaactattttccaggctgagtaaattctttgtacactggatttgtggctaaatcaaaacagaaagtagatccttctatctttgcattttagaaatgagtaacacatatcacataccagagtgtatcttttgcaattattcacaagcaacatgtttgaaggttgaaccacatacagtcaattgtactgttaaaaatttaatgcttttgcctgcagaatgtgccagtatattaattcagtggtgccttaaagttttgcatttgagagtcatgagcttacatcactaagcctggtagatatctgtctaataaggttcaatatgtttaatatatgagcctcttttttaaaagagtaaagataactttttactttgattttatagatttttttcgtgagatataaaatcatttatataagcaacgtcatctcatgctaaaacacagcactattcttgcattgcacattaaaagacccatataagactactgtttaaaaaagcagtctgaatttgtagcacagttttttgtttgttttgttttgtttgagatggagtctcattctgtcacccaggctagagtgtgtggcacagtttttcaagaatctattcctctttgattcagatattataaatactagggcaacagcagaagataaagactgcttaaatggcaaatctagtaaataaaagtcattagtatgttgaagtatatttaaatcttgactcaagaagagatcagtcactctccagtgaagtgcctgggaggatacaaggaagaaagtacagcaggccctataccagaggcagggctgtgtccagatgcctgaaatcatgccaagaatctggaggttcctcatccctgttgccatgtacacatataaacatatctcttagatgagaaggaaagaaacaatctgctgagatgatttcttcatccctcaacagggaaatgaaatatgggataggttgtgtatgcctttggatttctttggaaggaaaagacctctatggaataagggccaaaatagatagtgtcagtcctgttaatgcttagaacaaaaatacctacaacacctcagcaccaatccacaggcctgcagcatgtcctgtaggagatgcctctttgactcagagaagaggagacacacatcactgccactccatcaatgagtggaaaatgagataccccagcactaacagaatgaagcctcagaggctcacagccagtactcataagtgaagctgccccaagcctaagatcagaggcagctgttactccagacacatcagatggcctcaagtgcccaagtagaggccagtctgtagttacctccaagcaaagtatagaacagtgagacatcacaactatgtccatcatctctggaggaagaggttcaccaacactcagcaggcacaacactaaaaaggcatattggtaattattcatcacatttctccgatggcgctgatgttttaggaagaataagggggaggatatctgctttcctagattgctttttgcaaagagtgtcatggattaagaagaaaggtgagaggtcaaaatggtagccatcaagagggttccacccaatattgattggaccacaatgagtaggtaagatcctggtcatcaacaaggtgccacaagggtctgaatcagaggttgccccgaaacccccaacaactagataccactgatggcatcaaaggaacagggaggagccagggttctttcatgccttccaggctagatacttgcaaggaatatatgggattgtttatttcttaattaagaatacagaaaagctatctcaggccatttctacacatacatactagttgtgatttgacaggctttttaaaaaattagttcaattttagtagactttctaccaaattgattagagttgtaaatttgtctatacataccaagtaaatatgacttcctaacctgcagctttgatataatataatcttagtttgtacaaacttcataactcagcttttgaggaatgatttttttagtacaaaaacaaaattgccactctccatccctgtctccaaatacttcaaaatgaatgttttttctacatagaaggtttgtaatcatcttatctttggtgtaattgatgtctgatatattgatattctttcagttgcaaatacagccatttataacaagtgaatttttttcttctctaacaatataggtctattttcctaaatcataaataaaggctctgtagttagcctttcttctaataatcttgccatatcagcagtgaaagtggattaactgaaatttcacctttaatttttatctaatgtgtttactacagatacagcaaaatgtttttactaaaagccaaatattgaaccatgtcttagcagctaagcctgtgtgaccatttcctcattcctccttgtctagactgttaatactacttaattaaataatggctgacacaacaaaagaaacacttctatagatagtggtttataaatggaattggtgcattttctaaataagaaaatgcagtacagagtgtttcagttaagtacattgtgtcctgtggtctgtagcttacacaaaaatcaaggatgagaaacttctgaatccattttgccaccggcttgaagcctgtgactttagtcaatctacatgaatcactaagctttaggaaaaaataggtaacatagccacatgttcaagcaattcagatattcagtatgtagttttaatcatttaactttgcttagctaatccaaaaatacttctgaggagccaaccaatttgttaaagcccgtaatttgactttgggtttttaaaatttattatttttttatatatatagagatggggtctcactatgttgccaggctggcctcaaactcccggcctcaagtgatcctcccacctcagcctccaaagtgctaggattatagacaggaggcactgtggctggcccatagtttgattttgttataagagagaatacactgagctacaagtcaacagacttgaatttcagtgctgggcatcctaggtcaataaggtatctttaattcgtttccctgtcttgaaataaagtgtttggatattatatcagtggctctttaaatacattctctgaagcactgaagacctagccagttccctaaggccaacttggtttggttatgaggtaaagtcaagtgaagagaactttgagcctagcactttaaattggttaaagtaggagcagcctcacttttatctgtattaaaccactgaactaaataatagataaggtttcttgcagattagacattctataataaaggaagttagaccaagtcatatttctgcccacaaggagcttataatctaattggtagaaaaaaatacttgaacatttaatgtgtaagatagtgttacacatgtcagcactccacaatgatatagtaaaatgctaagtagaaggttataaatttgaggctgggataatatgcaactttgcatgcagatagttaatgcaaagaaggttcatcaaaaaaagagaagttcagcctgtcatcaggaaaaagtccatggtatgagtattaaaaaattgattattataacgagaacgagaaagagaatatattaattgtgaattaaagtagcttgtttctaagaatggctaatattttcagacttgttagaatattcatataagaagatgacagctattcctaaattgaaataatgttattgtatatcagcaaggggaaattaaaaatgaaaataggtcatgatgaaatatattaggagcaagcttgtatatttataggtttatggacaaagtctaagacattgcttcattacctttgctataacaaatcatatctgttaatattagaccatctgaacttaaatcaaatgatgttttccccaaaaggcagcggtcagactctcactaaatgaaattctattctaaaaacagccatatgattgaatggattctgcttgatggtaaacactcatcccctatttctgtgttgtaaatatttttccacaagacaatgaaaagccaccatgaccactgagatttcattttcgggactgtcacagtttcaggctgagatataagaaagaaccatctattattaaaggagcagaggtcaagtcatgccggtggccctcgtagggtaaagcaggggtcggggaggggctggtgcaggagggtggcaggagatctggaggagctagagtggcaggtactcactgtaacagggaatctcgagtgggcagtggagccaaagaggaaagcagggcaccgcgtagggacacaggcagcagggaagatgcctttgtgagaggagcgggaatttcaccagcaagaggtggcctgagtggaccagttggtctggctgaattgatcaagattgagccagaatcttagagggatttacatggcaaatctttcagaacttcaagggctttctgtaaattcaaggattcagtcatctggttaatttgactagatcttcccaagcacaaataaatggaaaattgacttctaatagtacctaaccttcactccgatatttccggcttttgaactttaccaaaggtaacctcccaggtgctcagcgaaaggaaaatttaagatagtacatgaaggagaagagactagacaaggtcatgcagaaattaaatgaaaaggcttttatttcacaagcagggaatcgaaaccagaccaccagtaagaaagggcaaagccttagcaactgagctacagcatagggcagtcttcactgttcttcccagaaagcatctagaatagttaattgtgagcttacacaggcttttaactactcaagataatttttagagctaattatgacataaaccctaaaattcctgttccctggaaggaggagaccaagagaaagtactgccacgtggtaacaaggtcaagctcccaaggacataaaacaagatggagataaacagtgatttttaccattcagtcaaccatttgcacagaaagagagaagccagaagtctgactggtaagaaattcttacccttttgccggcatgccaggcttctgggttctctttgcctgagcggcctccatgactgagcttgccacaccatcgcgctggggcaaagccacatcagaaaagaaaattatctttttctgttctggccagagtaaaatacatgtgacaaaaacatagacattagctgctctgattagcacccagtatcaaactggcaaggctcaaatttgcacctggttgggctccatcatcattaatccaacctccaaccaggagtttcaacctgtggtctctgggcaagatggttgccctgagtaatagaaaagataagaaagagaaaggagaaagagaaaagcattgcctgaggcagggtggggaaggtgaaatgatctgggaggccagagaaagacccacccattgcagcgacactgaaaaaaaagttcaggcggctgcttctaggtagcgaagggatcttttccagcaggcccatcatctctcaagtttccccttttagggaggaaaaagctccccatgtcccacgatcctgtacatgcctaatcctgtcacccacagttgtcagcaaagagtgcaaggcagattattccaaagagaatagcagttgacatgctgtagtgccaaacccattcttagacaaaagggactttacttagagccctcattttaaaaatgtacttcaaatgcattgttgttcattcggaacattccactgtgttatctttagtaacattttgctgtttctgtaagacttcgctgcctcccaggcctgaagtgtaagccagaaagaactcagttttccagaaactaaggatcccatttttacctaaaatattggccttacgctcagcttctcttgattaacttagccagtgatttttttttcctacccaagtgtaagaaaaatgaaacaaaggggtataacacaaaaatctgatttttcaaaagccaaattttataactcctgcaatattactgcttactaccagttcctttctgacccagtcagatgtaagaggcttctaactggatccaagccagttaattcccagatcaaatccattcctgtacccagtccagtttctgtcacaactccaaacccagtttggatcagaaatttgctcaaagaaactcagagagctcaaaacacaaatctgtggagctgggaaatccaagagggagcttaaccatgatccccagtggctgtgagagatcagtggagctcggaaatccaagagggagcttacccatgatccccagtggctgtgagagatcagcggagctccgaaatccaagaaggagcttacccatgatccccagcagctctaagagatgagtggacacaagtgggtcctgcaggtaccttgcatattcactcagcactgctgggggatgctagaagctccattttggatcccacttctgacaccatctgataaaagaaaaacttcagccgaattaaatttaaaagagttcaattgagcagtgaacgatttgcaaatccggcagcccccagaatcacagcagattcacagagaccctcttgactggtaaattctaaaagggcctggattatgtctctttagcttatttgtataaataccacctgcaggtttgagattgatgttaagtaatcataccatgctactgcacatgttcctctcttttttcacttttctatgacatttctgtttgtttgatgtacctgtaataatctctgttgacatttgaaggatagaagcaaatgccactttaaagcttcctcagtgcagatgaaatgatgataataatacaacacattttcaacacttttctggagaagtcaaagctcttcacagacattaactcattcatcttcacgatagcagtattagaggtaactggggacaagtattattggcattttacaaatggatgctgaggtcacctgagggacttttaacaaaagtcataaaatattacagtgaaaagatcaactctctgttttcagggatggcactgaggcccagcagtacaaaatgacttgccttgctctacagccgggcagcaagagattaggatggctgcgactcagtcatctttggcatctgcaggtcataattctcacccctgtgggatggttttggggcaggccagtgtccacaggaggcaacaccaagacacaggatttgaaggcaacagagcaaaataaatcagttcagaacagcctgtggacagcctttctctttgaacaaacgtttaaatctgatactgattttccacactgaaaattttcacagagttctacacagttcattcactttaccactaataattaatgcaaaaaggtcacattttgtggatttggactgtggttcttattttataagcccagtaagcttttcttttttcttaaagcagctctgattggctctttaactggaacatggggccttttatgagtagaacatgctgatgacataatacattagggaattctctttaacaaataaaaataacgattttgtttattttagaaagggctaaatgtttgaaactgatgatctttgtaaacattttctaactggcataattagttttgattcctccaagcagcagcattttcctggcctaattgtttttcgatcaacaggccgagtcataacacagaaaatgtggagaaggaagaataattgaacatcagaagccttctaatgcattccagtcctcatccaagggcaagggaaatgtgacttctgagagagaagaagataaatgcagccagtttcaaatagaattataatagcccttccttggacatttgagttcaaggaaggattagttgtcaggagagggaggtgatgagtgttcaccttgggaagagtcttagtagatcagggttttgagagataaggctcaaaaagaaagcacagctgatggcttgttatcagagacatgcataacaataagtcttgctcttaccattttcacaagcactaagaagttctggtagacactgcaagttaatttccagggcctcctgcatcaatgagtggaagtaaaggctgtccttggtgagcttcaatgagttgacaaaggaaggggcctcaccacacacagtctgtgtgctcagcatctctctctatacttttccaagaagctgcaatgcagatatatcatagactagataatttcttcctaaatttggcacactttttttcaacttggatttattttgatgcacgttaaatcaataaacatttcttaatgctttgcaatggcattacttcagctttcagggaaaccaaaggtgaaccaagagggaaacacttcccttcctaagttgctagcctttcttcccaaattttttccccaaattgtattgtggaattttaatgttgaataacttcaaacctacaaaaaaactgaagggacagtacagcaaaatctgtatacctttcactgagattcaccaagtgctaacattttttttctacatttgcatttatttctttgtatgtgtactaggccattcttgcattgctgaggctgggtaatttacaaagaaaagaggttgaattgggcttatggttctgcaggcggtacaggaagcatcatgtcagcatctgcttctgggaaggcctcgggaagcttttacccatggcagaaggcaaggcagaagcaggcactcaccacagggaaatcaggagcaagagagagattgtggggaaggtgccatgcacttttaaatgaccagatcttgagagaactcactatctcaaagacagcaccaagccacgagggatccaccctcataacccaaacacctcccaccaggcccttcctccagcatcagagattacaattcaacatgagatttgggcagggacaaatctccaaacaatataatatgtgagtatgagtgtatgtgcattacattctgaactatttgaaaataagttgaaggcatgataataataaacacctgaaattcctcagcttgtatctcctaggaacgaggtcattctcttgcataactacagtgctaatatctacccccaaaatgtaacattgatggaataatagtgtacagtccatatgcttactccccaagtgtcccagtagtgctctttataactttctaaaatctggagtctactaaaaaaacatgcattgtatttagttgtcatatctgtttagtctgtttttttttttttttttttttttgagacggagtctcgctctgtcgcccaggctggagtgcagtggcgcgatctcggctcactgcaagctccgcctcccgggttcacgccattctcctgcctcagcctcccgagtagctgggactacaggcgcccgctaccacgcccggctaattttttgtatttttagtagagacggggtttcaccgtgttagccaggatggtctcgatctcctgacctcgtgatccgcccgcctcggcctcccaaagtgctgggattacaggcgtgagccaccgcgcccagcctagtctgttttaatctagaaaagtcccttcacttttttggtctttcatgacactgacagcttttaagagttcaggcccactaacctgtcatctgcccccattctgcatttgtctacggtttccccatgattcaattcaggtcaggcatttttggccaaaagtattaatgggtgatattgtattcatccctagcatcatagcaggaggcacatgatatcagtatggccttttattggtgatgctaaggttgatcatttagctaagatcggactcatgagatcactctgctacctttttttcctttgaagttaaaagcaatacgtggagtactgctttggaactgggtgctatccttcttctccacattttatccagtagtttaagcatccatccattgatggttcttgcctaaactagttattacactggtggctgcaaatggtgcctttctaattctctaattctgccattccttcctttagtagttggcattcttctgtaaataataggttttcttctctccacctgcttttggcaattcattattcaatatattataatgcctctctctctcaggattcttttctaatgccccaaattagttccagtcgttgtgtccttttcacaggtctacatctgtttttgagcaccctcttgctttctggagcaagatgtttcaagctcactctgtactttgcctgcttgagacgaggcatctaaacagtcagctttaaatacaaagtgtgttccagggaagcaatcaagtcctttgtaaatagaaaagagaatttttaatttgtcctgtagcagttggagaatcaaagagcggtacagggtagcaagtgacattgagtttagacttgaaggataaaatatgcagagaaaagtcaatttgttctcggagggaacacgtcaaaaattttcgtagaagcaggaaattcctgatctattcaaggaacagcaagtagcagagagtggctggcaagcaggtaggaagtagccagataacaaagggccttaagtgccatgccaggatgtttgggccgggaagagggaatgtgtttgttttgaacatttcattataggcaattagggtcctccagttattctttcacaagtgttagaggagtgggaagagaaggtaataattgggagaaaagagtacaattagaagattatttgcaattattagaagaaaaattagaagattatttgcaggtacaattagaagattgtaagtatcttttttgtataatgacttcttttcctctgagtagatacccaatagtggaattggagatcattattctaagtgaagtaactcagaaatggaaaaccgaacatcatatgttctcacttataagtgggagccacactatgaggatacaaatgcataagaatgatacagtggactttggggacttgagggtcttgggggaaagggtgggaggtgagtgagggataaaagacttcaaattgggtacagtgtacactgtttgggtgttgggtacaccaaaatctcacagatcactactaaagaacttactcatgtaaccaaacaccacctgttccccaaaaacctatggaaataaatgaataaataaaataaaataaaaataaataactccctccccccttcaaaaaaaaggaagattatttgccacatgtccaagcaggcatttatttattctataccttatagaatgtagtatatattctcttggtaatttcacattaggtttgcttggattttggatttttggttgtcctttctacagttcctgctagatagttctcagccttcaagttgaagggcagaggactgagtctgtcttgctgctgaacacatgttaagtatttaagtgtttgttgatccactcacatcgtaagttcaaatcactcaaaatgattgtatatgcacactttgaatttaatgttctctttataacctcggactctgtgaccgcatagctacatatgaaatgaaaattactatctatataatcaaaccaaaaaataatgttcttctgaaaaaagcagataattgaatcataaatatagttcctgcttcaacaacctagaactgcactgttcaatctatatagtaaccactagctacgtatggccactgaatacttaaaatgagccttgtccaagttaagacatgctgtaaatggatttcagagacttagtatgaaaaaggaatgtaaaagaccccaaattttatatattgattatgttaaaatgattttggatatattgggctaaataaaaaagatattaacatttttcctatttttacttttttaaggtggctattagaaaatttagatttgtgatcacttatttttatttggcagtgctgagataaataaatatatttattttatagatggtctcaaacttgtattttctaagattctaatagaaatataagtacacaaaagacatgtactccacagctttacattaggactactttgagttttttacttcaagaaagtgaaaacacaacatattgattttatttttgaaaattttcaagagcaaccataagtataaatgccattttataagaaacaaattcactaataacccttcccagaattcatattttacagtataaattggcaatttttaaaatataatcttttgcctcatgtgtgtacataaaagacctttttttaaaaaatatatttgtcaaaaattaaaattgtaaagacctataatagtgaactgatgttacagacagtatagttttcttttcctggtaatgaaatctgagtcatattttcttaatgtgttgccatttctccacataggctaagaatcctcagagagtaaatggtgagtgtagacagtggtcccattatgttttaaatagttagtgatgtctaatatgtctaacttaactctccgaacttaacctaatgttccagaatggtagggagccttaagattcatcataatgggttcattaagcatttgtctatatgagatgtaaagtattcattaagtcttagagtgatttttaggctctcactaatgcatctccttaagtctccatcaggctgccaaaagacagctctgtacttcaggagaacagaccagcaacagttctcttctttagagctcttcaaagcatcgccttaacctcccttactaacttgttagtgtctgacaacttttattatcatcatagcctgtgattttagcctctctgagcttcattttcctcatctctaaatggaagataaaacctggctatgccttgagtggctggtgtactgtaaggactcagatcacgtcttgaatgaataaggattatgcccatctcaaatagcacctccattttgccctcaggatttattgattttagaaatgtttccattgcctttttaaataatgtatttatttttacaaaagaaccagcgtcgatctacagattcttgggaagccaggccagcgggcaggcctctagggatgccagtagccccccactgtcaaaggcttcacctccctcttgaatacacaacccatcttggctgccaggaaggcacctctgccctccttggcccacctcatgcttctctcctgtctgctgggtttgattgtatatctttcccttttactaaaatgtgagtcctcattttagtgagggcagagatactcatccttaaaccctagtgcctggcacagaatgaggctttaatatctattaaataaatgcatacatacatgcaggccaaggaatcacctgaaatgatgttaagtatttcacaaaagctagcctggaaaagttacgagtgtacctcattctacttctcagctggctataaactaatcacttgaattcaggcctttgctaattgttcagctcatgacatctctctttttgttaattttaaaagaaaaacctgatctgttttatcagcaggataacaggagaaagcaaagaagatggaaattacttgaatatgtatcatatgtaagattggccacataatccatacaacttccctgtgaagtagatactttctacatatttactgttgatgacacaaggccaaagagtttaaataactgagtttgtaaagctggtgaatggtagagccagggtttgaacctagatctaacttattaacttcatcatgatggagtcatgctctttgatagagagatgccttttctataaaagcacctgatcagaaaagtcatgcaggtacacagagaatgaatgcctcccactgttgcttttcagtgccaaaagcatccaaggccttgcagagtactccttcatgcttccagctccaaccaaggagccacagttcactaatgtagcttgtggaggaaagatgggcaagaaaccagggacaaatggccccactaactgaaaagagttgaataattggtttccaccgatttgccagctcttgctttgtagtcccctgtttttccagctttagagaaaagctgggaggacatcactgaaaacaatagaacacggagtgctaattctcgtccttacctttgggaaataaaacagcctgagataatggatgaaaattgtaaaatctatgttaatgtgtttatcacacaaaatatcgttgcttataagcttgcacatagatctgtaacttttatttttgccttttgttaaaaacgggtcttgatctgatgactggttgtctttgagcaactacggttggctgtagtctactctgcaaacaatggggggaaaaatccaagtcagattttctataattcagccagctaaagtgttggacaaatcctctagggtagaaacgaagaggtaatttgtttttctactatctgtacacagctgtctctttactagtttcatgtacttatgtcatgattggccttcagatatttggggtagaggaagttcatcataattccaaatattttccttaaaatttttttatttttctaaggttttgtccaaaaatatgattctgtgacttgaagaaaatatattccaaaataattgtaatgacatagtaaattaaaattcatgactttgtctctcaacttattcatcttagttttctatcatttttattgtactttccataaagttagagataatcaaaaccaattgttatctttaattaattgtaactatataactggtcttgttggaactttaaatattataaaataaaataaaaacataatttacaagtatggctaacagtggccttgcttaactcaaagaaatatttccttccaaaaaaaaatttcatcttcttatgcccaaataaaccactttgattattttcccatttgaaaattaattaggctacaacagtgtcttccaaacccagtatgtataatccaggtatttacccctgaaattctgaaatccatagtctggcttcaaaaatcagaaaggaatttatatgcagctataaacttgaagcacaattttgtactcctgttctttgggcctaagtaaaaactaggattttaatccattttctcgaatcatataatgtgtgtgtcaaatccaagtcggttgtgcatgcatgggtcttcacgagggagtttccactttaaagttggcaggcctgctgaagcactctaaattgccttcgcaatgaagtggtgtgaagtgctccctgattgcctccctcttggctattgggaaaaccttgaaaccgtaggcctgggataggtctcagtaagctacttggtaagcacccaggttccaggcaagaccactattcaggagaggtagagatttcaattgactttgctgtgaatccctcaaagatcaccaccctgatctaccaactatgtaacagtgtctagatcgatacatatttttgtgtatatcaccagtgttcagaaacatcatctcacagaagtcccaagtcccaaatgactcaagagttaagagcttcctatattgaagttcgtatcagggcaatattcacatgagattcactctgtattactgtgtagttttacttttgtgtttgcactagtaaaaacataaagaactatgaaaaataatttgagttttaataaataagctgtgtgaactggtaatactgacaatagattatcttgcagtactgttcctgaatttttaaattgccttttcaagatttcctcagaaagataggaggctccctctagtgggaagtgagcattgtaattgattgatttcccccaaagcagtgtgtataacttcataggtgttgtttgaaggaaaaggggcctcttctgactctgatagtttgggctccataacatttgttcatttttctctctgaattttggtaaagaaaataatattggttaccaagggatgcttataggacagctgtgagtttagagtcatgttgatgaagtgaattgctcctgtatcagcaaagagaggttgacgttaccaatctgtgcttaggcattaacttgttagaaaataaaaaatatatttatagctatatatttatgaaatgtataaatatatgaattctaatcttaattcataagccttttactttgataagtagtttaaaggattatcttatcatctcttgccttcactttatggctgagcttaagtgacttgctcaagattacacatttgaaagtcggctttgacctttgagtttctattaattttacagaatgtaagctgtattcactttggcttttcttactttatgagaaaacagtaaccaaaatcacatgcatttttttaggtaattttctatctgtctcatatcatttctacttgaagctaaaactacattctgtagagtgtaataacatattaaattttaattctgaattatcaagagaaactaaaattgtacccagggaaggaagtaagtagcacattacaaatacaggttttggttttataattagtaaagaaaaagaaaagattctaataaaatttaatattgagaatgatatataacccaaaatggtcaataaccaattccaggaagaatgtttacagcaagttatagaacttacccattttaaagccatacatcatatatttcacctatcccacatttatatatatttttatcaaagtgtgtacttgctttttggtaagtgacaaagttaatctacactggaggaagaaaaaaaatagttactaatttttttcccttattttcttacagcaaatgatgtgcttgcttttggaacattggtcagtacttccaatacctacgacgggtctggtgttgtgactgtggaaactgaccacccactcctctggaccatggccatcaaaagctaacctgttgactggcatccataagtgtgcctctgccttatctcatttctcaacagttcattgctcaacaagaacgattcacctgggtttgcaagaatctaaacctctctaggggaagcccactgggtttaaagatgttagtgtttagataatacaggtaacattataaatgacagatctcaattttatagtagtgggaaagatacatgctaagaaagcaaataagctctattatattcggttggaacctaatgggaatcattccactatacaattcagtactgattattcttcttacattattaatcattccatttatcctagaaaattgtttttaatttgaatcagagaaaactgttgaggttcctcttggagtctagaacatccttaaatgtctaacaacaagggctacctctgagtaccttttagtattagttttctgtatatgatatatattatcttatactgaaaaaaaattcctttcagattggggtgttagaagtgcaccaggtcactctgaccttattactgtctttggtattgtcttaaataaatcaagaatcattgacctaattgttaaatttaaaaataggtagttagcaataggtggaaagagaaatgatgtgaaagataaatgatgattcgtggagccctactcacacattaacccccaaattcaaaagtaagaatgcaaaagtctagagggggtaacagtctgcatcatcatcacaacctaaatggagaaagctgtgcagaggaaacttaagcataaaaattgaattcgtttctgacataccttagactgaaaaactgttggttcatccagaagtgtattcatattaccagaaaatgagtttgtctatggggatacatgaacttcatatactaaggagcctaactccaaagcctgcgttctcatcccagtctgatattcacctaagtttccggacccttttccttagctgtaaaatggaagcggttggactgatggtgtctgaggttctttcccacactgaaattctaaatattgacacttagcagtcatagggctgataatacacacagttactgacttagcctaaacaacctggtgcatcgaaatgtattcacctttcttttgtaaagagaccatcttctatcttctttccacctttctctgttttatgaaaccaactgttgacatacaaaccatgattgaaggagaacctgtccaacatgttttatgtacacaaatccctatgttgctataagaaaagtgaaagtaactgttttcttcttggtgctatgacagtgtgagactcaggttgtctgtagagaatgaaaggagcagtggcccgcgtgattgtggcatttaaggagcagtggcccatgtgactgtggcattttcggcacttttcattactttctgcttgaccggaagttgaggcttagctatgtttccatcttcagtttctgaagactagttatatattccttactagaaatatattcataatatataaaagaaatatatctgtgattttaaaattttgctaccaaagaatgcatgttctgtgtgccctgaaaatgttaccagtgttaataaatggatacttatcaaaaaagaa

SEQ ID NO: 238 - DNA, 172673 bp, Homo sapiens
  source 1..172673: mol_type = genomic DNA; note = NW_018654715.1:c674070-501398 TPK1 [organism=Homo sapiens] [GeneID=27010] [chromosome=7]
ttaattttttcattggtcactatattgtaggacagtcataaatgaatgaagcacaggttgagcttgacacaattaaagagaccttgaagtaaaagaagaacctttaaatctaccgagaatggttcttagaataatttaagaggcagtatgggtgttttgtatccttgaaaactctttgaatggcaactttatatactagattatatttaactttcccttactcagctgtttgtcagagtccaagaattgttttattcctgaattaagaagtctgaagtcccatcgtgctcacttttatgtacctttgcctctgtatgacattggaggaaaaggtgtcatttcaaaaatacggtctctttagccatccaagttcactagtgccaacaaactggcacttttgtggcttcatacttataaatatattgcagtgtttttcactgggtaagttatcttgtagagaaggcaaagaacttataaattcatttcatgatgtccaaaagataatccaggagacatatttacacaggcatagctccttgttctgtgtctcacaagggagaaagaggcttttatcaaataatattataggacagctgtcttggttttacttaaaatgtaaacttttattattacttcaatattcagattagttttttcattcatgtaaacttgtcatttctgcttaaagaacttcaaagtttcatcaaaatagtttcatttcaatttcaggtagttgagaatataatttattatacatgtatcaaagtccttatgttaatcgtgaatgtcatcacataagtattttttaaagacccattaatgtagtataatctatactttcttaaataaaacgattgtcataatcagtccattattgtaacactctaataccattcctgaaatgtcccatgatgtgaaataaaaaagataatgataatgattctaatgatacaggaatagtaaaggcataataggatatgtctattgataccttatctttacttttgtaactcttgatcttgttcataaaggtgaatttactacttattcttaccttttcttttactttaatacatagggatgtgagctcatttcaactcctgatcaagaccacactgactttactaagtgccttaaaatgctccaaaagaagatagaagaaaaagacttaaaggtaatatatacatgtatttggtggttattccaaggatgtgaaaacaatttgtgtttattttttcactcagctgaaatggatatttacttttgtgctttttctttttttttaaattgctgtcaggttttttttcccctgtagagcagataagtctgcacttagctgccaaaacattaacatgtgcacttaaaccagggaacacaaatgtaaacatcttacagtggcatggtaataaaatgggtgaactggaccgtgtgtcaagtaatcaaaactgggaactcattcttgcctgaaagcgactagctactattcgtctctagttgattgttgccatgaagagctatatgtatttttggactgtgtctatttacatattatataggcaaaacaaatatggccttgatttggcccctgggctatcattgcaaatttttatttaaacgaatatcagctttttttaagccagagaagagtctactgctttgcattctgtgctctttaaggtattcagtactgattttcacctagcatccaaatgtttaattgcattaattagtacaccagtttatactttattgtttgatacctgttgaaatggtatgcaaagtttcttaagactgtgtttaatgaacagctacaaaattaaacctgaagcaatgaatgacaattgacctttttttcccccactagcaggggcaataagttttaagctgagatgaatgatcagttgtgtaattttaaaccaagaaaagtaggaaaacacccttgtatattagaacgattttgatagtacaagtaacagaaaacacatgtcaacctgctctcaataaccaagtgatgtagggcagtcttgagacagagcttaatcagaactcatgccctttttcttttatttatcttggcttcactttgtaggttttgtcttcacactagcttccttgattgtctccaactgccacctgcagtaacattttacccttcacatgtagggggattaagacatagagctggtgagatacatcacttcccaccatcattggacttaacccttaagatctctccattaaaccactcttgcttttggcaaaggagaacgagagaatcctgattgtcttgggctggagccaggtgtgggatcaatccacgtggcttatatattcaaactacgtggctaaaacatatttggcaggatgggatagatatcagagtggcagctctaacaaaaatttactctctagcaaaagtttgttaaagatacactgtagcatatatttactaagttgcagttagtagtaaattcttttctccctttgaaataaaaccttgctaactatcacaattggcaagtagctcaatctgcgaactcaaacaaaaataattgagtgaacatttctcatctctgatgtagctttgctgatctatatcaaatgtattgtgatatttccagcagtaaattgatataattaagtatttgtttaatgaaagcaggaaacagcaaattgagagttacttatttcatccagatatcagtgatttggtgtttctttggaaaaacagtgtaaatattcacagctgtcttttgtttttcccatcacctccactgacatgattaaaagctaagacgcaattatgtgagtctaatgagttgtgtctaatcgatagtatcagtaatacagtattctgtcgttgaggcttgaaacaaatcatcatatcttaaactcaacaaggcccagatctagagagagccccaaactgagagaggagggtatgatctgcaaacaaatctgacagtcttggccaatctggtggggactctggaagcaagagtagctgttagagggcccctgcactgggcagaaatagcaacaaccttgtactccaactgtgcttagtcacagactagagggtgctcatgaggagggtggacttggcttagaggttgccaaggaagagtacagacttggtggctgtgatgtgctgcctcctgaaggggttgcagcgggggctgatgacggatgactggcctccacacagcctaacagtgagttcttttttgaagagcaatgcagtggtacactgcctgtgctgcctcaggccccaacatgctttggacccaatgcattctccagccccatcctacaccagtgtttctccttgttcttaaactatgccgcattttctcctccctcctactttaatgtgtttttatatatgttgccccctctgcttggaatcttatttttccttttctttgtctagaccatgcatgctagagggcttctttttctttttttttttttttcaggtctgatacatttatttatttttatatattttttatttcaatgggttttggggtacatgtggtttttggttacatggatgaattgtacattattgaagtccgagagttgagtgcacctgttaccccagtgtagtgtacattgtacccaataggtagtttttcatccctcaaccccctcccaccctctcctcttctgagtcttctgtgtccattgtatcactatgcctttgcacactcttaggttagctcccacttataagtgagaaaatgcagtatttggttttccatttctgagttacttcacttagaatagtgggcatggcagagtttgactggctgtccttaactatcactctaggttaggtttagttactctacatttccataccctcctttattttttctttagggtattctgaacaattttgatcattttactaattgtttctaattgtttgcctaaagtcattcttgccagcttgactgtacagcccatgaagctgagctcaggtttgcttgttcataacttgacagcagtattttgcataaaagaagtattccttgaaagtttggtacgttttatgcaccacaagaacacacaggagagtggaacataacacagttaggagaaggctttttagagaaggctgagacatagtaagcaaataggaggtagacagtgcattagtccattttgcattgctataaaggaatacctgaggctgggtaatttataaaggtaagagttgtatttggtgtatgcctatgctggctgtacgagcatggcatcagaatctatttggcttctcatgacccctcaggaagcttttactcatggcaaaaggtgaaggggcagcaggcctgtcacatggcaagaagggagcgagaaagatgacaggctcttcgtaagaaccagttctcttggcccagcatggtggctcacacctataatcccagcactttgggaggttgtggtgggcagatcacgaggtcaggagatcgagaccatcctggctaacatggtgaaaccccatctctactaaaaataaaaaaattagctggggtgatggcacacacctgtagtcccagctacttgggaggctgaggagggagaatcacttgaacccaggaggcagagtgccgggtccaacccgcagaccctgacccagcaacagatgaaagacatacactgacacaggtattttgcctgtcagtgggactaaggggctctgacgcctgagtctgcagctttcgcctccataaaatggcaaagtttgcgtttatttagtacaaattaaatgacaaagttctcaagtaaacaccactagagggtaatttacattgttgatctcctgagtagagagcagtcatgagcccacagatgatcaaaggttggtcttaggaccacatgagtaaaaaagctatttagataaactcctttacattcctatgtatctttgccctaagcttttaagagaattcagttgccttcagccaaatccttcactgaagctatgcaaacccactggccttccaagaaggtttgtgtctgtttcctataactttataatctcccaccaccctgaccgatatcctatagcggaggttgcagtgagctgagatcgcaccactgccctccagcctgggcaacagagcaagactccacctcagaaaaaaaaaaaaaaaaaagaaccagttctcttgtgaactaatagagtgagaacttactcattagcacaaaggtggcactaagctattcatgagggatccacccccatgtcccaaacacctcccaccaggctccactgcagaaattggggatcacatttcaacatgagatttggaggggacaaacatccagactatatcagacagcaaaggggagaagagtgtttcaggaagtactgtagtgcacacagagtgtgtatagcactttgtaggagtgggcacaactcctatctccatcctcgtagggtcctgactgggccttgagaattaaattgacctgagatagattaacaagaacaaagcataaaattttatttcatacaaattttacatggcatgggagcccacataaagaagtgaagacccagagaagtacttaaagcctgttgctttatatactacattggacaaagaatagtacattgtgaagaagcatctaacttacttgcagaggcttgaaagataagagttattttattgtattttttatttttgttttttttttatactttaagttctagggtacatgtgcacaatgtgcaggtttgttacatatgtatagttgtgccatgttggtgcactgcacccattaactcgtcatttacattaggtatatctcctaatgctatccctccccactacccccaccccacgacaggccccggtgtgtggtgttccccaccctgtgtccaagtgttctcattgttcaattcccacctatgagtaagaacatgcggtgtttggttttctgtccttgggatagtttgctcagaatgatggtttccagctttatccatgtccctacaaaggacatgaactcatccttttctatggctgcatagtattccatggtgtatatgtgctacattttcttaatctagtctatcactgatggacatttgggttggttccaagtctttgctattgtgaatagtgccgcaataaacatacgtgtgcatgtgtcttgatagcagcatgatttataatcctttatactcagtaatgggatgactgggtcaaatggtatttctagttctagattcttgaggaatcgccacactgtcttccacactggttgaactagtttacagtcccaccagcagtgtaaaagtgttcctatttctccacatcctctccagtacctgttgtttcctcactttttaatgattgccattctaactggtgtgagatggtctctcattgtggtcttgatttgcatttctctgatggccagtgatgatgagcattttttcatctgtctgttagctgcataaatgtcttcttatgagaagtgtctgttcatatcctttgcccacttgttgatgggttgtttgatttttttcttgtaaatttgtttaagttctttgtagattctggatattagccctttgtcagatgggtagattgcaaaaattttctgccattccgtaggttgcctgtttgctctgatggtagtttcttttgctgtgcagaagctctttagtttaattagatcccatttgtcaattttggcttttgttgccattgcttttggtgttttagacatgaagtccttgcccatgcctatgtcctgaatggcaatgcctaggttttcttctagggtttttatggttttaggtctgacatttaagtctttaatccatctcgaattaatttttgtataagatgtaagtaagggatccagtttcagctttctacatatggctagccagttttcctagcagcatttattaaatagggaatcctttacctattgcttgtttttgtcaggtttatcaaagatcagatggttgtagatgtgtggtattatttctgagggctctgttctgttccattggtctatatctccgttttggtaccagtaccatgctgttttgattattgtagccttgtagtgtagtttgaagtcagatagcatgatgcctccagctttgttcttttggcttaggattgtcttggcaatgcaggctcttttttggttccatatgaactttaaagtagttttttccaattctgtgaagaaagtcattggtagcttgatggggatggcattgaatctacaaattaccttggacagtatggccattttcacgatattgattcttcctatccatgagcatggaatgttgttccatttctttttgtcctcttttatttcattgagcagtggtttgtagttctccttgaagaggtccttcacatcccttgtaagttggattcctaggtattttattttctttgaagcaattatgaatgggagttcacacatgatttggctctctgtttgtctgttattggtgtataggaatgcttgtgatttttgcacattgattttgtatcctgagactttgctgaggttgcttatcagcttaaggagattttgggctgagatgatggggttttctaaatatacaatcatgtcatctgcaaacagggacaatttgacttcctcttttcctaattgaataccttttatttctttctcctgcctaattgccctggccagaacttccatcactatgttgaataggagtggtgagagaaggcatccatgtcttgggccagttttcaaagggaatgcttccagtgtttgcccattcagtatgatattggctgtgggtttgtcataaatagctcttattattttgagatatgtcccatcaatacctaatttattgagagtttttagcatgaagcgctgttgaattttgtcaaaggccttttctgcatctattgagataatcatgtggtttttgtctttggttctgtttatatgatggcttatgtttattgatttgcatatgttgaagcagccttgcatcccagggatgaagccaacttgatcatggtggataagctttttgatgtgctgctggattcagtttgccaatgttttattgaggatttttgcatcgatgttcatcagggagattggtctaaaattatctttttttttgttgtgtctctgccaggctttggtatcaggatgatgctggcctcataaaatgagttagggaggattccctctttttctgttgattggaatagtttcagaaggaacggtactagctcctctttgtacctctggtagaaattggctgtgaatacatctggtcctggactttttttggttggtaggctcttaattattgcctcaatttcagagcctgttattggtctattcagggattcaacttcttcctagtttagtcttgggagtgtctatgtgtccaggaatttatccatttcttctagattttctagtttatttgcgtagaggtgtttatagtattctctgatggcagtttgtatctctgtgggatcggtggtgatatcccctttatcattttttattgcgtctatttgattcttctgtcttttcttctttattagtcttgctagcggtctatcaattttgtcgatcttttcaaaaaaccagctcctgcattcatgattttttgaagggtttttttgtgtctctatttccttcagttctgctctgatcttagttatttcttgccttctgctagcttttgaatgtgtttactcttgcttctctagatcttttaattgtgatgttagggtgtcaattttagatctttcttgctttctctgaagcttgtgcatgcatcgtgtagttctcgtgccatggttttcagctccatcaggtcatttaaggtcttctctacgctgtttattctagttagccattcgtcccatcttttttcaaggtttttagcttctttgcgatgggttcgaacatcctcctttagctcagagaagtttattattaccgatcttctaaagccttcttctcttaactcgtcaaagtcattctccatccagctttgttctgttgctggcgaggagctgcattcctttggaggagaagaggcgctctgatttttagaattttcagcttttctgttctggttcctctccatctttgtggttttatctacctttggtctttgatgatggtgacgtacagatggggttttgatgtggctgtcctttctgtttgttagttttccttctaacagtccgtaccctcagctgcaggtctgttggagtttgctggaggcccactccagaccctgtttgcctaggtaccaccagcaaaggctgcagagccacaaatattacagaacggcaaatgttgctgcctgatcattcttctggaagcttcgtctcaggggcactgagccatatgaggtgtcagtcgacccctaccgggaggtgcctcctagttaggcgactggggggtcaggaacccacttgaggaggcagtctgtctgttctcagatctcaaactccatcctgggagaaccactactctcttcaaagctgtcagacaggaatgtttaagtctggagaagtttctgctgccttttgttcagctatgccctgcccccagaggtggagtttacacaggcaggcaggcctccttgagctgtggtgggctccacccagttggagcttccgggccgctttgtttacctactcaagcctcagcaatggcgggtgccctccccggacccccacccagcctcgctgccaccttccagttcaatctcagactgctgtgggcataggaccctctgagccaggcatggtatgtaatctcctggtgtgccgtttgctaagaccattggaaaagcgcagtattagggtgggagtgactgattttccaggtgccgtctatcacggcttcccttggctaggaaatgtaattccccgacctcttgcacttcccgggtgaggtgatgcatcgccctgctttggctcatagtccgtggactgcacccattgtcctgcacccactgtccaacaagccccagtgagatgaacccagtacctccgttggaaatgcagaaatcacccgtcttctgcatcgctcaggctgggagctgtagactggagctgttcctattcggccatcttggtacctccccgaaagataagagttattttataacaagacaaggatgccctctctcagcgctcctattcaacatagtattggaagttgtaggcaggcctgtcgggcaagagaaagaaataaaggctattcaactaggaagagaggaagtccaactatctttgtttgcagatgacctgatcctatatctagaaaaccccattgtctcagcctaaaagcttcttaagctgataagcagcttcggcaaagtctcaggatacaaaatcaatgtgcaaaaatcagtagcattcctatacaccaacaacaggcaagctgagagcaaaccatgaatgaactccccactcataattgccacaaaaagaataaaatacctaggaatacagctaatgaggaaagtgaaggacttcttcaaggagaactacaaaccacggctctaagaaatcagagatgacccaaacaaatggaaaaacattccatgctcatggacaggaagaatcaatatcatgaaaatggctatactgcccaaagtaattaatagattcaatgctgttcccattgaataattgaataataaaactaccaacacattcttcacagaagtagaaaaaaactaatttaaaattaatatggaaccaaaaaaacagcccaaataaccaaggcaatcctaagcaaaaacaacagagcttggaggtatcacgctacccgacttcaaactataccacagggctgcagtacaagaaaagacagatagaccaatggagcagaacagagaacccagaaataagaccacacacctataaccatctgatttttgacaaacctgacaaaaacaagcaatgggggaaagattccctgtttagtaaatggtgctgggagaactggctagtcatatacagaaaacagaaactggaccacttccttacaccatatacaaaagtcaactcgagatagatgaaagacttaaatgtaacacccaaaactctcaaaactctagaagaaaacctaggcaatgccattcaggaaataggcacgggcaaagatttcatgatgaagacaccaaaagcaattggaacaaaagcaaaaattgacaaatggtatgtaattaaactaaagagcttctgcacagcaatagaaactataaacagtaaacagacaacctacagaatgggagaaaatttttgcaatctgtgcatctgataaaggtctaatattcagcatctataaggaatttaaacagatttacatgagaaaaacaaccccattaaaaagtgggcagagtgattatattaaatctgaggaagtggagtatctgtgagcttccacctgactttacatttaacttggaaggtcaacactgtattttatttgatgttatagcaagagaaaagcaacattagaagggaaaataatacaagatttccctccacccatactcctgtctccatatgagatcatgaagcctttttaaaatttctcctgataatacacataaactgtatcaaatctttatatgcctcttctccatctaataaatcatatcaaattattatatattttttatttctacttattaaattataaatatgaatttataatcaaagtatattttataataggcctcttactataaaatgttaattgtaatgtaaataaaatgcaaaatagtatttaatatattaaagaactatatgttagaaattcatagaatttgaattaggtctgtcctgatcctaaaggagtttactatctagaacatgagattactttttttaaattcccctaaattacctttttagttcatgtatccatctaattgaaacccaatcacccttaacatttactcttccacaaaaggattctctcatacctgggactttttaaggctttgctttcatgttgccacattgtttatctgtaactgagtcatgaatactacattatcaggatgccatctgatatgtctgagtcttcaaaggacacatatattttcggatgctgtgatacacacttgagatctaaaccctgggatttggtggaaaacattaaaagctgtctctctaaacatctaaacatataagatgcatgttctttacaataaagcagaaataaattaagattatgaggccctaagaataacaggataggtctctttaggatatttactagtattatatggcaacagaatcagttacttcaattttaaacatagactatatattagacaaaatctgagcagaaaagtttccattaatttcaatctgaatgctttagagatttaaaccaatactagttttatttgctaaaacctcagtacattttagccagcttatattatgccatgtaatttcttaagcagtttttaaatcaaataatgaaggatggtgagtaggttatatgaatgagggcaaatgcttatattatatatatatgtgtgtgtgtatatatatatatacatacagctacacacacacataaatgactgaattaaataatactgaaggccataggtttattacatattattcttttttattttcttaataggctgggcaagtactgaattgtgatttacatattttaagacatttctgtataatttgagtatgtccaaattgaagttattaactcttgaccattaggactctgttaagaacagtctttctatttaatgtctacatggcatttctcagatagatacattatctttatacagcagcaaattctatgagcttagaatattttgttttatcttctaattatcagtattggatttaggtgtacattacttttctgcaatggactggtggatttgttttattttcatactaaatatgaacattctcctccattgaaaatacaatttaaggctaactgtctgattggactaattactcagcagcataaaaagatgtgactcattgggttgcaggaaaaaccatgatagtaccccaagagatatctttccaggtactctggtgtctcagtacagcctgctttcatgaactggtatctttggcatgatctaaaggaaaatatatgtgtgtgtatgtgtaaaaatgtattctgaaaaggaaaaaatctttatagtggagaatcctggcagataccacattaatcaagtgaaaaacattaataacatcgttatatcatactagtaatgccctcctacatggatataagttgagaagggcacttgtggagttcttctctaaaatccacaattccactttaacctttaaagtagtcaaagaactccaagttgaagaatattccatcaaatgcctgaccaacatttttaaggccaacagagaaagactgagaaattgttatggccagaggagatgaagaagacatgacaactaactgcagtatggtaacctgatttctgttgtgtagtggaaaaataggacattagggaaagctgttgaaatctgaataagcttgaaagtttagttaatagtagtgaccaatgtcagtcttagttgtatcctatgtactgtgtttagacaagatgttaacactgctgaaaactggatgaagagtatactccttgtactatttttggaactttttagtaaatctaaaattattccaaaacacaacatttcattgagaaaatatattcactgtttcaaatatgctattaccctagaacaggtgtaatcttttagtgaatggctcacagtaatatagaataaaggcaagtgcttcttagtacttaggcaaaaaaacaaaaaacaaaaaacaaaaaaaaaacaatgccttttgtggactctcccacctttaaaatatttcctcaggaaattttaaattgtgagtttctgatgcatatttagacaactgttttacatgaaaattatgcctggtagaaaatcttaggtagacatttgatggtctttaaactatggagacagcccagatgctctcaactttcccactttcccaagggataaatttcaaaatatggtaagactctatcaaaggtagaactgccactagatatgtttttatcaggattaactctagaagtactaacctatgtattcctgcctcttcttcttgcctgtcagtctctgtcctggtctccttcagcctctcattttctcttgggcattgcctgtgctgacattctgacatacctgcttttctcctctttatcttgtttctgtgaccttcacttaccacttctgtgccattcattaatttgtacctttaatcctaaactccaaatttgtacctaattcgtacctttaatcctaaactccaaagctgtttttctccttgctaactggacgaccagaggaacttcattttattgtctaaaacaaaattcattattagtctcacaagaatctcgttttctctttttatatttcctttctcattcaatggcactaccatccaactgcctggcggaaacctaagagtaagtttatgccttactctaccatcccttgacagttggtcacagttccctgaaattcttcagatctctgtcctatggcagtcttgctgccactatatgagttcaaacatttatcatttctcacttgggttactatattagcctctgctcgcccccttcagtacattatcttaccaaaattcatataatatatcttaaatctatatctgctttaaattttttattgtctctcattgttatgtattcaagaaatatttatttaatgaataaatgcatttctaataacatcagttttctctattccaaaggacattatgctaaaacttagctggcgtatagaactttcttcaggactcttgttgctagcattcttgatgccatgttaattctcctgtgacatgtgtccaggtgctttagaatcttgcttgtctctaccaattgtgacaatgaatatgcttattattgaaagtaataataccaccttaaactttaataaaatgttaatcttcaaagcactgtaattagaagtcaggtattcaggtgctcaggataggcctggcactctttttagctgcatgacagtagaaagatatttaagtttttttttgttgttgctgtttttttttttctttttctttctttctttcttttttttttttttttttttttgagaactctgtcacccagactagagtgcagtgctgtgatctcagctcactgcaacctccacctcctgggttcaagcaatcctcctgcctcagcctcccgagtagctggtattagaggcgcacaccaccatgcccagctagtgtttgtagttttagtagagatgaggtttcaccttgttggccagcctggtcttgaactcctgacctcaggtgatccacccaccttggcctcccaaagtgctgggattacaggtgtgagccaccgcgcccggccagtatttaagttctttaagcctggattttctcatctgtaaagtaaaaatactaacccacctataacagagcattacatggtaaagcacgtatttcagtgcccgtcccataggaagtccttattttaaaaattagcgatagtggtggtaataattgtaatacactcttgtgcaactaaatgtaatagattttgtggaataatatcacttaagaattagagtatgtcttagaaatctcttaaattagttacagttttttacccaggttcatgggactctcaatagagtattgtgggtttttttttttttttttggacatactctaattttacaagaactctcaatatcagaaacttgaattaaactgagaacttattacatgttaatgtatttcccaggtgagttctggaacttcccctattcccagagaacctatatatattaaatgtatctctatatttaatagtggaatccaacagagagtgagatgtacaacccaggtaactatttttgtaccttgcctttgtgtggagaaaaaaggaaggatctgctctacccttgctaatcctagtatggacattataggccttatgctcatgaaaggttatattaccctaaaattaggcaaaagttcatattagagttccacaggcaaacttcctcctcttagatatactatagaggctattaggtatcttcttccagtcaccttaacaaacttttacttaatatctgttctgtttaagtcagtatgctgtgatttcgtgactaagtccataatctcaaacagccttcggtctaatagaggagacagatttacaggtgaccatagaatgatttagactactgtaataaatactgtaacttgcctcttcagaatagattcaacttcttttggatagattactctgcagttatttatatataattcctttttgagaaaatggaataatatagtttttttctaatgaaattgcagctcatgttgaagccttctgtgaacatcatatttaaggcagcacccctcagctctacctcttgaatcccttggttaagccatccttatatcttcccctgctccattttcttgtcaccatctgacatactacatatttaggatgtttgtttctattacatattcattcaatatattataaacttcacatggacagggaattctgcatgtttgtactctgctgtgtcctcagcatttaaagcaatacctggcacatagcgggcacttcataaatatttattaaatgaatcagtagttaaacaaatacagaagaatcttgttgtaacaaactcttatcaaatgttagcaaacattaagtatctgctttaacttaacagggcttattctattgccacagaacttaccccttgagaaattttttattttggcagtacatggaaatatccattattatatctactattacatgattatatatataattatgttgtaaatggttatatatccagtattatatgattgtgtatgattatttgattataaataccttcagtatttttacctacaacagaggatcttcaataggatgtatgttgtgtgtaagtaaaaattgtacagtccatatatcttcctctcatttccttaattggtattttataactttttggaactgcttcctccaagttctaagttatttgtaaaagtcaagagctaaaacatgagaatacataaagcttgtctcatatgccattgccattgtgaacttgataataataaatcttgctgtctttcttgaagaagaaacagtgaaaggaatactgttcaattccaacatcagctgtgtaaccgaggcatcgtaatacttttatgacaagtttcactacctttttgcctgtgccagtgtacctcaaagggatatggtaagcttaaattgataattttcataagattctagaaagtaacatgacacatatatttatttatatatatattcaatcattcagttacacataaatatgtctacatacaccaatccttgctttttagtatataacaacattgttctgtttgttgagtgccaaagtagctacttaatatgttcagattttggaacaaacgcagtgcaagctaagtatcagacaaagaggcaaagagaaggaacagatttctgggcatcagcctgtgttagcaggctatttcctagatcattttggagaagccttcaaaagaggaattcacatctctatttctgcttcttagagatcagcaatcttttttatagtgctgtgcaacaagagaaaatagataaacccagtgctttgaagtgacttgggagatgttgctacggatataaaaagcttactaccttagaggctgtggcaacctaatccatccctgccggaggagaagcatgctttttataggccccaagacaagggttaagtttatctgcttaccaggaatctcagcttgatgactcacttgccagataaaatttcttattaatgcagagaattccagatttggttggtgtggggctcctctgcaaaagacacgctgaccttacatgaaaaggagtattttattttgaattaccgcattgtgagaatgcagaaattacagatggagaaactatgtattgaggacttttgtaagaaaaattcacatataatagaacatcctgaaattacttagtagattataaaatttgtcctcattctgtatattccttagccagaaatattacatgtggtagtccctatatctataattatgattgtccacaatgataatactgtctatatttttaagaaatgttttggggctgggcacaggggctaatgccaataacttcagcactttgggaggctgaggcagaggattgcttgagcccagaagtttgagaccatcctgagcaacatagtgagacctcgtctataaaaacaaacaagcaaaaattagcagggtgtagtcgtgcatgcctttagtctcagttacttgggaggccaaggggagaggatagcttgagacttggaggtcgaggctgcagtttagccgttctcgcaccactgcactccagcctgggcaacagagtgagaccctgtctcaaaaacaaacaaacaaaaataaaagtttggcttatagtttaagtcatgactgaaaaactgtaatgatgttactggtcattacaggtctacatatgtcagatcgatatatttttagtggtgattaaataggtaatgaagaaaagagatgcatgtaattttttgctttgtgttaggtgatgagcctaggtatctcagaaagttccatgtaagttaaagaagaagatggaatcctatagtattcactttctatccatctcttctgttagtagctggaagtagaagatgtttctgttgtgtccatgaccctctgctttcccatttgtacttagcactccatggttaacgtgccgtttcaaaacagaaaatggcatacgaaaatccagatgcatggagtagaaataagatgattctagcttctttcctgaatctgctgtgtaccttcccctgtgaacatatatgtcgatgtatataattctcaatatgaacaaccggatcagggtatcttgaaacatataggaaataggaatatctaaatcaagttatattgattgcagtttaattctgtttcctcatctatttctactagagaatttagatgcgtatcagattgaccctaaagattctgatttttttgtaaagcattcatataaataaagggaattattttagagaggaaattattatttgaacaaatattttatcccagattacagatttactttgatgctcatggatatggaatacgtttaagtaaaatagcaaatagcattgcttatcattttaaggtcaaccttggggttgcttcaacttgtgaagcaaacttactgcattgtgaagcaaacttaactgcattgcaagaaatacactttaattaatgtcactacagtaatatgtttaacattctcatttggcattatgaaatggtccagtgcatatctagaaaccagaatgttaatggcaaagtacaaaatttgcaatcaaaatgctctgtgttctcccagaaggtggaaaggggataattaatgtaaactgtgtatgttacaccagattgctagatctaaggattgcactacagcaagtctgatggccacctgttataactgggcaataaaaagtggagagggttttaaaccactaaactttgggggaaataatacaccaaaaatagtacaaatagccaaatctaatttatgcagacatggaagccaggtgtttcatgtatcactttcaataagactgtgcgactaagacttatttcatggctgaattcaagcaagaaatattcttagattaaaacgaatcatgataatgaaagagaggatagttgctattaagaaatgatcacaagtacagatatactaatctcctgggaccagagcatgtctttatcacagtcaatcagttccaaagtggcttggaaaattgtcttttgtcaacttgatcattggtgggtgtgactgaagaaagaggatacagattctgagctatcataacccattttccatggaaagggaaggagtgactggttcgtgttctttcaggtattcaactttagcggggcattatgtatgttagagaatttttagccagagtaaacaatacttggtactttttgagtaagacttcaacaataaattttggaatgttttcaattgtgtaccaagcaacatttataaaataaaattgtaatatcctttcaaaagactgtcttcaaatagctaattgtttctgaatataagtcacacttttatttttcattttacactaaacacctagtgtgttaaagatgctacactaggtattatgaccattctaaaccacaaacaatggatctttccattcctcataacccccgtaattcaaaaggaatgcctttgaattcactaaaatatcttcatatcctgagaatatgagaggttcggacaccataattacctctagtaggttttataatatctatgctgtttatacagacactaattttatgtattgttatttactcataattcctgctcttctcctcaaagaatttaattttcagcaaagataagttgaataaaattatgttaaaaaagaaacttcccacaacggtttttttattccattcacctctcgtttatcactcacttctgatatagggaaatgtaaatacctgcttatttgccctttctgtcccatggtgtatttatatggggaagaaaaataacacatttctacattttctagatataaggttattgtttttgtttatatgcaaaaaatgtcccatctatagggatctcactgatctggcttgaaaacctatagtccagttaatcaaggaaatatcaatattcaagacagctttgtgaggaaagcactattattacaaccacgattattacaaaatcataaggcaaccaggcttgaaatgtttaattaaaagattcaaaatccttgcctagggtgaatcagaaaaggttttcattgttcagggagtgaactctctgtcattgtcctatacattgtcatgaccagagtacctgaaattaaagtgctttcagagattctttgaagcaatctgagggtaaacagaacacacctatgataaaagcactgcatccattgtagctagggagtgctctaaaggaggagaaatgtcacagcagtcacagatttaggttgtttggggtcaacatatgaagaatctttaatttctagataagaaatttgaaccttgatctatatagataatggtaagctattaaaaaattttgaacagaaaatcataaggcaatttagaaaaataatgtaatggttgtatgcaagctgcattgaaggatggaaaatctaatgacagtaatgaaccaattacagtgttctttgaagaacaatactttagtcattttctccatcaagaatttgagaaaggaatagagacctcagaaattagccttaaagtatatacttggtgctgattgatcttttctgacaaaattgaaagctcaaaactataactattcagctaaacaaacatctattttgcatgtgccaggcactctgctaagtattatagattgagaaatgcaaactgaatgagacccagtttctgactctaagactgtcctgtctttgggggtggatgcacttgtaatcagattatctggatacactgtcagtagtgctacagtagaagtctgatagggtgggtgagaagcccattgaagcaaacgttttccagcctagagtgttcaaagactccttcctagtggaggtggtcagtctgctgagtcttgaaggtatagtaagggctaaccagaataaggggagtgtttattttgagtattcaaagttaaaggtaaaccccttaattctggaatgtcaaagaataggcagtcctgagagaatgtaataatcacacatacaccctgggttcaggcaatatttacatttgcttcctttaacaagctagcagagaacttcactgggattggtcattctctcctggactcttctcctgctggttcctatcttagtgtgtcagggacctctgccagcaagactttcttcttccacttatgcaaggaagttggagtcccttggctgagctctccagagaggtacaggggcatcagtgctagagagttaatgagagtatagactgcctgggattttatgctaaaacttttaccgggggaattatgatttatagcagacgcatatcttagcacagatcttcatcacagctcccgtagtttttcaaatgcaaagaagcttgtgtacattgctgactcttcatgtgtggttcctcctccttttttaaaaacaccttttttaaaaaaataacatgttgaaaaaaagattttttataatcatgtgttatagactgagtgttcgtgtctcccaaaattcatatgttgaaatcctacccccagtgtgattgtatttaggaggttgggcctttggaaggtaattcgttcaggagggtggagacttcatgaatgggattagcccttataaaaaaaagagcttgtttctctctctctactctctgccgtgaccatgtgaggatgcaatgaatagatggccatctgcaaaccaggtagagggtcctcaccagaactgcatctgctgacaccttgctcttgggcttcccagcctccagacctgtgaaaaataaatgttgtttagctactcagtctaatttgttaaagctgccagagctaagacaacacatttatgacatttcttattaacactatgttaagagtttagaaaagtaggatgaaaacactctatccaatcaagttcacttttttaggtggtggaggtaggcatcttttggaaatacttacagtaattaaatgctttacaaggaaaggagcggacaggtgatagtttaagcactaaagttggaaatcttgtgaggttttctgagatttttttttttttttgaaatggagttttgctcgttgcccaggctggagtgcaatggcacgaccttggatcactgcaacctcctcctcccgggttcaagcgattctcctgcctcagcctcccaagtagctgggactacagatgtgcaccaccatgcgataacaggctcatgccaccatctccggctgatttttgtgtttttagtagagacgaggtttcatcatattggtcaggctggtctcaaactcctgacttcaggtgatctacctgcctcggcctcccaggagtgctggaattataggcgtgagccaccacgcccagccgtgttctgagaattaaagtatggttgtcccttggtatctatgggggatttgttccaggacctactgtgcataccaaaatctgtggatgctcatgtccctgatacaaaatggcatagtatttgcatataacctatgtacatcattctgtatactttaagtcatctctagattatttataatacctaatgcaatgtcaatactatgtaataattgttatactgtattgattaaggaataatgacaaggaaaaaaatctgcccatgttcagtacggacacagttttttttctgtatatttttgatccatagttggttgaaaccaatggatgcagaacccatggatacagagggctgattgtatttctagaatgtaaatgtggggtgggagttgaagatgtgatttatgagacaggactggaggcaaatggacttcatcttgtggagcctgaagaaccaatacctaatttttttttttttttttttttgagatggagtcttgctctgtcgcccaggctggagtacagtggtgcaatctcgtctcactgcaacctccacctcccaggttcacaccattctcctgcctcagcctcacgagtagctgggactacaggcgcccgccaccacgcccagctaagtttttgtatttttagtagagatggggtttcaccatgttagccaggatggtcttgatctcctgacctcatgatctgcccacctcagcctcctaaagtgctgggattacaggcgtgagccaccatgcccggcaccaatacctaattttaagcagaacattggcaagccagatttaatatttggaaaacttactgtcataaccaattgaaagactacttggttatagaggcaacattgtagataagaatgccagtggaattatccatgtgagaattatgatttctgaattaaggctgtggcaacagtgatgaaataagaattatttgagataaatctagaatttccttggttttcttatctatgaatggaagcctcaaaattttgccactgcaagaggcattatttctatctcacccaaacatgcttacatgaaactggaccttacattataatgtagcctgcttgaaatgtaaacaggatccctgtagtagtgcttccatagcctgacaagatgcaacaagatatatcctgtgtttgttcatataacataccttggtactataaaatacgagttctttactttctctggtttctcattgagcttcatattaatcagtagaattattttataggcttactaaaacatgttttagtattgcctttttttttttttggtcagattatttgttcttgctctatcttgatcccactcattcctccaaacgctgtattggctcttccatcttcaaattatggaatcaaacaaaccaagaatttcattattctattgaagcctcactagagtgcagtacacatctttgagagttaaaggaagcttattaagcataatctaaattttttataccctagtgtttaattttgttaagttgctatactaatgttagttgtaactctcagacagtagggtaaacatgtgccttggtttacatgggatagtcccagtttatgcctgtattcttggtgtaatttatttataatgccccatttttactttcaaaagtatctcagtttgtacattaaattgtatgatcaccctatcagggagagccacaaagaaattatccatttatgcatttctagaattcaatttatgggaagtaaatgtaattaaaacatgctgacagccagtgtgcctgctgtagacttcatgcatactgtctcttaagtctttttgaggacaaatggagtaaaacttgtcacttatttactaaaagatttttactgctataatagaaaaatgaaattacttctcttttggtgctatatgtccctcaaccagtcttgtcatgattctattaaggtaaataatgcaaagctgagttttgcatttattttctaaacaaaatacacactatgactatttaacttatggtggaaaacagagaaccttatatggacttaaacgtgaaaagaatcttgaaaaatatgataatgaatttagtgcatccccttcctttacagatgagtgacctagatcaccaagaggtcatgtaacatatatgtggttccatggctacttaagtggcatacagtgctatagctagacctccaatgttttaatccagggtttcaaggtccttttcgctagatgggattgcatatgaaaaccacaggccacctttattcccatcacactcatcttgtaaacaaaaaggtccatgtaaaatatcctgactttaggaaatatatggaaagcagtcagaaattgatattttacattttatatatttaaaatacggcataataggtatgtgctgagtagctttatgtatgtatgcacgaatattttttaaacttttaattgactatatgtttatggggtacacagtgatgttttgatacatgtatatacattgcggaatgatcaaatcaggataatttgagtatccatcactttaagtatttatcatttctttgtggtgagaacattgaaaatcctcacttttagctcttttgaaatatataatacattattaactgtcatcactgtgctgtgaaatagaacaccagaccttatttcttctaactgtaactttgtactcattgaccaatgtctttttttcccccatacaacaccaggctctgataattatcattttactctctacttctatgagtttgacttttatagattccacatatgagatcagacagtatttgtttctttgtttctggcttatataggttcattcatgtcacaaatgatagaatttcctagtttatttttaaaggctgaattgtattccattatttatgtataccacagtttttaacccattaggtggatacttgggttatttccatatcttgactattgtgaataatgctgcaatgaatgcaggaatgcaggtatctcatcagcataccgatttccattccactgggtatgtcccagtagtgggattgctggatcatatcatgattctattttcagtttttagaggaaattccatacatttttttgaaaaatagctgtactaatttgtaaaaccaccaacagtgtatgtataaggtttcccttttccccacatcttcaccaacacttatctttcaactctttgataatagccaatctaaaagttgtgaggtgataattcattgtggttttaatttgcattcatctgatgtttaaagcatgttgagcatttcttcacatatctgttggccatttctatgttttcttttgagaaatgtcttcaaatcctttgcctatattttaaaagggttatttgttatcttgttacagggtagtctgagtttcttgtatattttgaaaagtagccccttatctgatgtatgatttgcaagtattttctcccagctcatgggtgcctcctttattaattgtttctattgctgtgcagatgcctttcagtttgaaccaatcccatttgtctattttagcccttgtaacttgtgattttggggtcagtatctaagaagtttctacccaaaacaatgtcggtcatagagcgttttctgcatgttttcttcttatgttttatggtttctgctcgtatgtgtaaatccttaatatattttgagttgattctttcataaggggtgaggtaaggacccaagcaactcctagactcaagcgatccttctgccttagctttccaagtagctaggactacagatgcgtgccaccatgcaaagctaatttttttttactttttatcttttatttatttatttatttatttatttatttatttatttatttggtagagatgggatcttgctatgttacctaggctggtcttgaactcctggcctcaagcagtcctcttgctttggcctccgtaagttctgggattacaagcatgaactaccatgcctggcctccaatttctttctttcttatgtagatatctagttttcccaacatcatttattgaagagactacactttctccaatgtgtgttcttcacaattttgttgcaaatcaattgaccatagatacgtgggtttattttggagctccctatcctattgcatgggttgatgtatctgtttttatgtcagtatcatgctgttttgattactatagcattgtaatatattttgaaatctggtagtgtgatacctccagctttattctttttattgattattgctttgtctatttggtgtcttttatgactccatatgaattttaggaatgtttttttctatttctgtgaagaactacattggaatttttatagggattacattgaatctgtagcattgtgagtaatatggatattttaacagtattaattcttccaattcaagaacatgggatatcttttatttgtgtcatctttaattttttgttaatgttttatagtttttagtattcagatctttcacttataatttgattaaatatactcctaaacatgttttgatcctattattaatgggattgttttcttcacttctttttcagacggttcgttgttactatatagaaactactgattttttattttgcaccctagaactttactgaatttatcagtttaaaccattttttggtagcttctttaggattttctgtgtatattaataagatcatgacatcaacaaacagatacaatttcacttcatcctttcctgtttggatgctttttatttctttctcttgcctaattgctctggctaagactttcaggactatgttgaagtacttaatatgatttttatcttcttaaatttgttagacttgttccatgacctaacatatgatctattctggagaatgttccgtgtgcacttaagaagagtgtgtcttctgttgctgttggatagaatgttctgtatatgtcttttgggttcatttgtggtactttaaagtatagttcaagtccagtgttttcttactgattttctgtctggatgacctgtctaatgtttctaatgtttaaagtggggtattgaaatcttctactaatattgtgttgaagtctttgtctcctttcagatctcttaatgtttactttatatatttaggtgctctaatgttgggtggacatatatttacaattgttatatcctcttgatgaattgatccctttgtcagtatataagaatcttctttgtctatttttactgttttctgcctaaagtctattttgtttgtattatgtacagctgcccctgcattctttttgcttccattttcatggaatgtcttttttattccttcaccttcagcctatgagtatcctttaaagtaaagtaagtctttaaaggacactcatagactgaaaatgaaggaataaaaaaggcattccatgttgagtctttaaaacaatatattcaaccactctatgctttttgattggaaaagttaatccatttacatttaaataattattgataagtgcagacttactagtgccattttgttcattgttttctgtagagcaattgttttttagatcttctgttctttttttcctcttgtgttcttcctttgtggtttgatggctccctggagtagtatgctttagattttttcttcttatcttttgtgtatctcttataggattttgctttgtggttaccctgaggcttacgtaaaacatcttatacttaaaactggctattttaaattgataacagcttaattttgatcacataacgcatactacacatttactcttctacttcccacattttatgtttttaatgtcttgttttatgttttttataatatataatcacttgaaaaattattaaagctgtagttttgtttttggtaattttgccttttatcctttatactagaggtataattgtttacccagcactgtttcgttattagagtgtattggatttgacaatatacttgcttttatacttaaagttttatacttccatatattttaatgttactaattagtatcctcttcttctgcttgaagaactccctttggcatttctcataagacaagtctagtgatgataagctctctcagtttttgtttgtctgagtaagtgtttattacctcttcattttcaaaagacaagattgctgggaatagtattcttggttgacagaacaacccccatcccccttctggattttgaatgtatcatttaactcccttctggcctgcaatatttctgctgagaaatacactgatgcttttgtggagattcctttacatgtgacaattcactttttccttgctgctttcaacaccctaacttttgacattttgacagtgatgtgtcttggtgtgggtcttttttggatttatcttatttgatatatcgtaggcttcttgtatttgctttctatttccttccccaggctggggatgttttctgccattatttcttcaaatatattttctgttcttttctctttctcttgttcttctagtacaccaataatgtttaaattgttatacttgatggtgtcccataagtctcttaagctatccttaccttttttcacttgtcagatattgctgaaggattaagtaataaaaggactgggaattgaccactgagttttgctgtgtagatgccatgaataatcatgtttgatggagtaataaggggtagcaaacttatctcttatctgtattactataatgatctctttatatctcctgactttccttcttgcctttccacagtttattctcaacacactcagcatgctgactttttaaaatatatagatcatatctatatattttaaatatctatatattttaaatatctatatatttttcacctttttcacattctaacttatatattcatttaaaaaaacctttttatcaagtgtatattatccttcatttgaatattaactccatgaaggcaggggcttatgtatttttgccgatatatcctaagtgtttaggatatttcctagcacatggtaaatgatcaacaaacactggttgaatttttcttgtcattagcttgtaactaaagcttttaaaagcatcagatgtatatctgagctaataagtatgatgtgtttgctttttttcaaaagctactacctgttggaatcatttccaagtaagaaagtactattttgtaggagttaggtgatgttaactcagctgaataattagcttcttgcctctctggttatttattcagtttttcctgagtatttatatgctcaagggaagctcagtaaatacctgttgtctactctgttgcaaacactgtgctagcggctgtgattcataggcctcctctagaaggagagattcacaagtatgtcaatgtttataaccaagtatgactgggtgatgttagaaataaatgcaccagggtttgggttcatgtagaaaagacacacttgcagtctataaatggtctattttagattgaacactctgtcctctttccgatatctctgtgaatttcaaatgtcctacttacagccagaactaaagaactgcaaaaatgatccaaagccaattccttttctgtcccacctgcagcttgcattgatcctctagtgtttttaatcaatcttgctaaatacttcctgtagggaaaatgagtagtgatgagaagtaatcttgctgctactttcttctgaaaaatttaatgattgatttacagatattgcctgttcatcatgatatcccattgtagaagatggggattaaatttcagtcttaaaggttatgggatccctcaaggcttagcgtatagtaatgaaaaattgagaacctagaaaggggatttcggattctgtatagtgaataaacttttatcaggccttgcttctgatatgaatttaggattatgtggataggcatatgccatgagctttttactgcagccttagaactttctctatattttatatacaatttcttatttatgtatttctcttcagtttaaagcaaatgctgtagtttttctgaagtcataaataatctctgggcctttcccaactggtctgtagaggcccttttaataaggcctcctaaacataaatagaaatcagttacctaacttgatatcacaaacagaagccatccctttgataagtctttgtctaatggcttacaagttaactctttcctctgaatattaacagatgtcctggaaattgcctgtgtatttggagtaatacatactccctagagtacatggtctttctgagccacaaaacctaattcttcgaattctaaaaagatgtccaaggagaataatagatcctttagatgtatggtttgcctggtttctgtttctttttttcttttttgtgagacggagtctcactctgtcgcccaggctggagtgcagtggcgcaatctcggctaaccgcaacctctgcctcctgggttcaagtgattctcctgcctcagcctccccagtagctgggactacaggtgcgcaccaccacgtgggcccagctaatttttgtatttttagtagagacagggtttcatcttgttggccaggatgatctcgatgtcttgacctcgtgatccgcccacctcggcctcccaaagtgctgggattacaggcgtgagccaccgtgcccggcctgcctggtttctttgatttttaatttttgatgttcctgggtacatactagatgtatatatttctggggaacatacagatattttagtacaggcatgcagtgtgtaataatcacatcatggaaactggggtatccagcccctgaagcatttatcctttgtgttacaaacaatccagttataatcttttagctattggtttgcctgtcttaaaatattttaagcttaatgtgaagcatgttacccttagtaaaaattcccattcttcttacattctgataaggtcacagataggaaactcatttcagaacttggttcttctctataatttacttttagtgctgttatggaaccccattttgaagtatacattcccacagtatggcaattaatctatttcttctttaggctaatgagtcttttcttgcaatgtcttcatttattcattcgtcaaactcttgaacttcttgtatgtaaagcactttgcaaaatcactggtataaccattgaaccagagaaacacaacatttggcttcatgacctgataccacctatttctctaggaattgaataggttctgttggtgcttggttaacaggttattattctaaagtcatgccatctttatggatcacacattaagcctttttaatgtattattttaaaacttaaacaccaatattctgtatttttacttattttttgtatgtgactctatgtgactcccagttttaccttccttgcttaggttgatgtgatcgtgacactgggaggccttgctgggcgttttgaccagattatggcatctgtgaataccttgttccaagcgactcacatcactccttttccaattataataatccaagaggaatcgctgatctacctgctccaaccagtgagtcaaaagtgaatataatgtgagccctttccttcacaaagcttctaccacttgagtagactagaagaaaacattggccctgcttgggtcttcgaactgtgagtggaattgaacatgtgcgctttcttgtggccactttagttttgccccaggtcactgaccagcaaaaatgtgaaggagaatcctgaaagttttcattttattgtgtctaaaaaacaagagaaagtgttgtaactctaaattgactaagaattaaattgagcacttttgcgttttgaacagctgaatgtgaatgacatttgagaaaaacctcaataggggaaacacaaggtttggcaaatgttgctaatgtaattcttacgtattttgagtgttgtcattatcattggatataactggaaactgggtttgatttcgttaggcacttagaagacagtctttagcttttactattcataagttgcctggtgattagtttctctgtctcagaataatttctaatgatgtctttcatttccagtgataaacattaacgacattttctctcaatgtagtgcatagaacagaattcttactaaacaaacaaattttatgaggtttattggtggatttcagttttaaaatatcatttggtaaccttttttttaaaagatagtggacagtactttccatttttgcctctcattgtggtctactacttatattttgctgctaccctgttgctacccaccatctgtagcctggcattactagaaattgtagtttggttaatagggtgggtttagtgcatgctcactattctttagccagttttgcatttttttcctggatctttgcgtgtcctagccatgttgctttctggataaatatggaaggggagaagaagaattcagatttcaaactatactatccatgtattttgtcaaccgttacagactgccttctacgtatttgttgcactgcctagcaattaaggataaaaataaatagttgcatgtgatctttgctctccagattaagtgcaatgaaagatccatttatacaaatgtaatcacaatgcaatgttgaaagattagtaccaaaaaatgaaataatagaaaactggagcatgtgtgtagtaagaaaagtcttcacagaggcactcacattgtattcactcaattaattcaacaaacgtttactgagtacctgctatttgccaggctcctttctagggatagagcagttaacaatacaaacagaaatcctttcatgcaatgtaccttctactaagcttacaattcaacagaatcttcaaggatgagtagattcttgctgtggaagatgatgggaaagttatttaatgcaagaagagccagggaagaaacatggagatgcaggatgtgttataggatttgcaggtaattctgtgcagctaaaatatgggctgtgcagctacaatatgggctgtggtatggaagaatgccagaagataagatacaaaactaattgggatactgattgtgaagagctttaaattccacacaatggaatgtgaacttctttttgccataggttttggaaagtcattaaaagattttggttagcagtacagatatgctttttagatttcttatcaatttatatgtttgttaaatacccatagactcccaacagcttctgaagtttgaaacttactactattgtgaagcaatgagctttgttctattgcactgaattgatggtatgactgctaaagtattcagtcataacttgtctctgtatagatgctctggtcaatatattactagttaaagatgcagtacaatactttttaaaattataattggcagattcactgatagaaaaagccacatctaaaatatgaattctacattaaggtatttttactgttttgggtttctgtgttttccctataattggtataattatgagctttctgaaatgcatttggcttgggattcattggattttcttccatctatagattgttgtctgtcatcatttctggaaaactctcaatcattatgttttcaaatattgccctattctttttctcttttcttctgtacctccaattaaatgtatttaagatcctctacttgtatcatatatatctcagcactttcatattttctatgtcttaatctctctgggcttcattctgaagttcttcaccacctctgtgttctgttcactgtcccgcttcagctctacctatctgccgctagacccaccctctgcgtttttaattcctgccatgattattctttcttacacgcttgccctttactcacattttcaaggggctctttcttaaaacataattatcaaactggttttatagtctagaataattctaatgtaagccagctgccttttgtgttcacttttgctttcacatttcgtgacctcaattccttctctgttttatgatttttggcaggacctcacatttctgagaactttaagtgtgggaattatttgaggtgtgggttaaaagtaaatccaaggagaatttacatttgcttttgcctggctgctgagtggacttgtagcccagttctgtgggagcactaagtacttaggacattttgtctgagactattttggaccacgttgtcagtgtagactctgaatgtaacactgctgagaatctgatgtctggttacaaatgctcaggggagacttttctcatcttctcagttatggagtgccaaagtttggttggccacttttcctagcagaccagtgggagtgttgttcatattcatcttgatattttggatctctgctttacgtggtacagcatccttttagacgtcaaccttgggcaggccttgggctttgtcttctgacaaccttccctagttgggggctttagaaactgaagctcaggttcatctgatttgctaaacactctccagatgaaagttagccttggccttctttttatatcaaaatgtagtttttggcttctgggcaaaattcttatttctttccttttctttcttttttttttttttttttttggagacagagtctccctctgttgcccaggctggagtgcagtggcgtgatctaggcttactgcagcctctgcctcctagaattcttttttttttaaagatacatttgatgcattttagaagattctcttaattttttttttttagtatttgtattgttttcagttggccagggcactaatctatcatattgcctctgtacctcagttacttcccacccccccctccgtctatgttgcagtgatgatcaactccagatctgagaggctttccaagattaggtttattaagtttttttttcttattaatagaatatctgatgtggcttgagaggcatcccacattttatatctaagctaactggaacacattgctgaagcagggaaactgattactagaatgtggcaccatgttttttacaggccaggcctgcctataacctgtgtcaccttctgcaggaatgaagttctgccgccccagcccaactgcaaaggcagtctaggaaatgaagcttgtgggcccaggaagaggaaacactgacttacaaagcaattctttctcaaactgccagacatggatatcttgaaagaaattctggaatcatgaccctacataacttataggaatgtaacatacaatgtgttaggctttagttagttattaaggtggaatccccagttctctaaagtggtaaacatgttaagggtacctgcatagccaaatccccaaatataatgcaatgtagattctctctgtgataattttgattttgtgtcattggaataactacaaaattaccttatcctaatgaagtaattattacatagtgtggtgcaaaaagaacatgcaaaattacactctctgttctttaagggagtgacaatggcaggcacaggcttccacctgtggggttagcagtgcagcctttgctcgtcttggccactctgttctagggagttctttatcgagacacagcctggctctctgcttttctatcacttttagtaagggaatagcaagaaaattagtaacacaaatgcatatgttgaagtgaatatgtttgggggtttaaggtatggatggatctcatgtgatccaccatattggtaacaagttttaattgtatacccgtgaatgggattaatactaaaaatcagttaaaaactactagagaccgggtgtggtggctcatgcctataatcccagcactttgggaggccgacacgggcctgtcacctgaggtcaggagtttgagaccagcctgaccaacatagtgaaaccctgtctctactaaaaatacaaaattagccaggcgtggtggtgcatgcctgtaatcccagctacttggaaggctgaaacaggagaattgcttgaacatgggaggtggaggttgcagtgagctgagattgcgccactgtgctctaacctgggcaacaagagcaaaacgtcgtctcaaaaaacaaaaaaaaaactactataaaattactgcacagaagcattctacatcctagaaatgagacttgcaccactggggctgaaatggctctgtcaggtgttacttcatataactgcatcattaatatatgtgatacatgcactaaatgtgcctatacattacatggtgtgcatactttggggaaggtattcagaatggacatctacagcagactgttcattatttttagaacatacagtcacagtccggatgggcaggagaaatgttataaatttaaactgaaatcatttaaaaatattgcaaaagtaggcttaagaaaatgtctcgtgtgctttagcgccaaataaagaatgacttcaaaactctaaatttttaaatttttttaaattaaagttaacatatagttgttgaggaggaagataatactgatacttttacaagaagcatctcatctgagccttataacaatactgggagaaaagcaggataatatggtcacacagtgaagtgttttgtctcaacactttttccacaacattacatttcctccttcatggggttaatggactaagatgcaaataataaactcttgaaacaagtcacagcccataggctggtaattgtccataagcagtgtgtaactgatggccagttggtgtatgcatgtgtatgtataaatatatgtgtgtgtgtatatgtgtacatatatgttttttccactatgatattattttcaagtaaaataaatcttggatgcactttaaggatctacctcatcttgttgctgtatccttaaggaaaaatgactttctgaagttttataataaaatttacatctaataataatctttcatcatttaagcagactaagtgatttaccattaagctttgctaaagtatgttaaaagtggtaaaaattcaatataaatgttaattattacgagtgttagatttgagcctagagtgttccagaattttttttcaattagatgatctgaaattaaagataatagtaggaggaataagtcatcttacagcaactgtttatctgatcatttttttagtctagtaacttggtaagagagcttgtgttatatctgctacactaattttaattggctagaatagtcctagtccctggaaccagaatgcacttttcttgatctttttaaaaaagcctatcctcatatcatcttagtctttctgtgatgttctgtgtttcttttggagtgtttacatatgagactctcatgagactaggttgtgtaaataagtaattatcttccattcattaagattattttagtcatttcggactgacctatatgtcatagtagcaattcacttaaagtgtatagttgtttcagtctaaagtctgtgttctcttttcagtcccctctctgtggtgtatttttattagttataaattgaattttaaaacaaggatacaatgaggtagttccagttaaaatgaatatgggaaggtgtttggaatttttttagctggttgttttttttagcatgtaaggtttttcatattgtatttttggcatatttcacttactatgggtcaaaatgtaattatgagtgaaaaccttggtaggtagcatttactttgtaggaatgttcaatttgccattcgaaaaatagaaaattcaaaataggatgcataatagtcccttcctttaaataaacatccttcttttacttccaaaaatgtgttcttgataagacatcatcaccttttatgaggaggggatgctatgaaatagatgacagacatttcagatatgaaacatcgctgatgtcagtaactagttaggccatcttcctgctgaagagtcaggtgctcagagccatgtttatcatgctgcctgtgtggagtgcgggtggctctaggtttcacatacattctttctcattttctggtcctgtgcttctcaggagtacagaaacattagcttctgtacactgagcataaattatcttttatctccaagttttatggcagtttgtaatacaagttaataggatttataaccaagaaatgagatgtccaagagttaataaggcatggcttttacattatcctaaaccttgctcggtgattcccgctcaggattccagtatctgatataggagaaggtggcacagagaagacttctgtcagtttttatctcacttgagcaaacttgcaaatatgttgtaaatatttcttcctcatcattttagtcatgctttactgctgcttgttttttttttctctttcaccagatcaattatttactatataatgtcctaacattatttacattatacatttgtaatgctggtaatgaatatgataaaatatgctgggagtttgatagaagctgaatattcatgatataaatttgctatgcctgatggtttctgctgagaactgggcgtttgggtcggtctacccttgtgtgcacatgtccagcacaacctcatcagtgataacatcaaagaagtgattctcagtgtgattttgagtaggcgacagagagttctcaattctagacaacactgaaatcttcccacactatttattacccgttttaattcccttctttggaataatcattattattttattcttcctctgtatctttcatgtaatttttattgttgcttggccttttagaattcctagtataaactacatagtatcacagaactattaaatatgtattattaaatataataaactattaaatagtgtgaatagtgtaaagctttagagatcgttttatagatgagcaatttcagagacatttatgtgatctgcccaaggttatatgcagtgtttctttggtaggtgattgatactgaaattgaaaaagatctgatgcagtaatagtctgaaaaaggaccactaggcatttcataccagaaatgccctgttacactgaccttcccaacctccctccgccttccaaaaggcgcattgtgaatacctgttcctacctggcctacacccacctcagcttgttgccctgggaaagttttgccactcagggttcaacgcctggccgaaatactctttaccttcaaattgtgtccttgcctagctctgtcctttctttggcttgtttgctctgccatgccatgcagcaggttcttcttcacatggaatacacacagacacatcttcgctaagcctcctcttcttttccctctcttcaattgttgcccggctttctagggaacaattttcaatactcattctctccttcttctctttcccctttcttttgtgttgtttcctcctcctctacatgacatttaaaaaaataacacaaaaacctatcctgttgtagtatgtgttaatctcatacatataagcaggaaaaccttgtattttagtatgaaataagacaataaaattccagagctatacagttctcattttttaagtgccctagtgttccctttaaatctccatagaaaattttcctctatggttttatccatgtttaattaaactaattttcatttaagaagttaaactacacacttgtctttaccttgtagctattgttgtctgttttgttgattcacagagtaggatacttcaaaaacaaacattcagtaaatacctatgatgtgttagacactgtggtaggcattcagagtacagaaataaaaggcactgcctttattctgctgctcacagtttagtacaagagacagaataaatattaaaattcagaaatatgtatgagaaaacactgggagcaagggggatggcaggaataaagcatcttacccagacgggacacagggccggtggtccccaaccctaatacctgccactcacccatgcagcatgcaggctctttgaccttaaagaagcctttcactgagaaagatttataggaagatatccatcagcaaaaacttaaggtgatccctcagtgattccaaagcagtataggaggaaataccgaattcaatcttcatggaaactgtttgaaaacttacgtgaacattggcctttcctttcagccatgagtgatggagaatcagttttggagacttgaatagtttctaagaaatgatatcaagactccatatgtgatatggagatgatatctgaactcaagactgctaagaagtcaggcaaagaaaggaatagtgacatttaatgtggaaggaatataaagcaagagaacttggcacatttggggaacagcaaattgctggatcacggggagccattggaggtgcagctggagggaagcagggtctagagcatgagggcttgcttgaatccccaggaagatggtctctatattgagaataaaggtcaggttttaagggtttttttaatcaaaggagtggcatttgattgacattttagaaagtttaatttggtgggagtatagattgtttatggaagaaatagaggccaaccaattctcttggaaatccaaggaacaaatggtgagtaaacttaagtaaacatgagagtgaaggaaaaatgatggagtttgttgggatgtgtgctcagaagtcttcatcgtagaaatgcagagggaggagtcggtataataactgcatcctgcattagggaactgggtgctgttcttctttgagatagagcaaatgggaagagcagatcaaaatgtgaagatcagcagttgactctgggatataaagagaaagatctatctttggaaccaaatggaattgcctaaaaggatatatgttctggcctggaggtataccttgaaaattgtcaatatgtaaaaaggcaaaagagtgatgagcttggatatcaagaataaataggatacaatggatttggcagccaggaagaaatttgataaggtagaaagccaggaagaaattttgatacgtttttatggcacagtatgggtagaaactatattactatgagttgagtattaaatgggaagggcagttgaaatacatttgttttcttttgtattattgtttacccttttttgttgttcccttatagaagttgatttttttgtgctaaactgggaactaataatggcttataaaactgttttggtgagaccatttttccaagttaaaaacaaaaccatggcacacgtatttgggattttgcctttgtatcttgcgcagcatgactgagagctactatgctgcatgtttgtaaagtgctgcagatattcatggacactaattataccagcatacactggagaagtacttttcaccctacttttaaccaatactttcttcaagaaaaaagaaaaagaaaaagaatctcctggcccaaaccccagctccacatctcttataaacccttcgacacctcttctacttgaacatctgtggtatggggctaaggcatggtggaactctgtgtcaaaccttttagactccttttctggtctagggaaaactggttcgaacattccacaactactcttttctctgcttttttgaactcactgtacactttcaaaaatatttttaagtaattcttgtcttttaaaaccctactcaaaatttttgtcttctatggagcatttccaaataaaccctctaaacctccttcatctggatcatttttatcttcttttgtcttcattccggctgctataacaaaataccataaacttggttttataaacaacaaattcatctctcatagttatggagattgggaagtccaagatcaagacgccagtagattcagtgtctggtgagggccccttggctggttggctctttcttactgtgttcttccatggcgaaaggggcaactaagctctctagggcctcttttttaaaggtactaatcccattcatgagggctctgccctcattactaaattgcctccctaaggctctacctcttaatactatcacattggtgattaggtttcaacagatgaattgggaggcaagtgcatgaggaacattaggaacaaccaaacactttttttaaatttttttttctcctttgggcctcaaatactctaaacctaaaacaaaatttattgagttataacttttcttgtttctgaactttaaaaaacaaataattgcgtattttgataaaagatgaaataacaattttcacagtttaatgctagccaagtctaaataaataggaagttttagataatctaaatgtattattccattaccagaagcatccagtattgcctcctcttataaaatgtgggctgcctggacatccctggttaagagtcagaggctataacttgatccacttatttcgcatttgacacttgccttttccttgtattttgggtgcttacttgggacagtaattgtttcttttggtggttggtagcatgttactgctggacaaatacatcaaatacatgcagataatggtggtggtggtggtggtggtggtggtgggctttaaagcaacctaggtatgatgatgtttcaaggggaaaggagtgaaacactaccctgatacctgcctctcacccacacagcatagaggttccttgaccttagagaagtctttcaccaaggaagatttatagaaaggtgttcatcagcaaaaacctattgtgaccctcagtgatttcaaagcagtaagggaggaaatatcaaattcaatcttcatggaaattgtttaaaaacttatttgtacattggcctttcattttcaaccatgagtgacagagaatcaatttggagacttgatgcaatccataagagtgttgtgtgcaggtgcaacaatagaaaagatggcatcagcatttgtctgagctctgtcaccataatttatcataatccaattctaggtaaagtaatggaatattggatgcaggatgtcatcttttcctttatcccccctcccacagtcctctgtggcaaggacactggtacactgtgtcatgtatacttagttcaattgagcattgctgcagcatcttcctttgattgaaaacaaaaggttgccaatgcagttatcaatgaactgtgaagtgatttgagtgttaccagcagggaaatgaaatgagcctctgggaagaagattggcataagtgaaagtttctatataaagagctccatacagctccagctgggttgttctagttctcggccaattaaggttttttcctccaaatgtgggagaattttcatcttacttgttctgaaagtaatcaaaactaaaagtgaagaaaagtggaaaattttacaaagaaagttaagctgggacaggtggggctggagggtatttattcagaccatacatttaccctagatattttaaagctctttcaaggaattgtgtaagatgtctccctcccccacaatacacacatatacatagaacacatgtaatatataagtacacacacgcaccacacagttttactaagaaaaaggaaagtaaggattctagatcttaggtctattgagaaggatttggttttttttgttgttgttgttttttttttttttttttgaaaactagtgtgtttgtcttttaaaagctctaattaattcttcataactttgttattatctgaattatgatacttgacttacatatatacagaatagtataccagtggaatttttttttaaaaagtttcagagtctgaaagcaggttagcaggatataacctaaggtgatagacacacacagaaagagaaacttagtttgaataaacatagaagaggagaggtattcccaatttcatattgttttctgaatcagactgagaaactgcttataaaatattaagtagatctgatagtctaaacattgaagatatactgaatattaatatactaaatctcttgaccgccgtgcatgatttatgaaatatcctctgtatccaaaaggatggaagattaaaaaacaataacatttttacttatatactgaacactttggtccacttaacacttttacaatttatgaactaccttcatcatcatctcatttgcttctcccagcagcccttttaagtaagcaggctaggtacatttttcctacttctgagatgaagaaattatgcataggacaacatagtgaatccatggcaaatccatcaacaatctaggaattttctgaatgctgcttctataccttttctttataagaatccacagttactctctaaatgttattggatacatatggaaggctccaaaaggattaagaaaaaaataaccagttttacatatcttctgcgcactatgaggttcacctaggagtaagcatttgtattagtctgttctcacactgctaataaagacgtacccaagactgggtaatttataaagaaaaagaggtttaatggactcacagttccgcctggctggggaggcctcacaatcatggcagaaggtgaaagaggagcaaaagcacatctgacatggtggcagggaagagagagtgtgcagaggaactgccctttataaaaccatcagatcttgtgagatttaatcagtatcacaagaacagcatgggaaaaacctgcccccatgatttgtttacctcccactgggtccctctcacaatacatgggaattatggaagctaaaattcaagatgagatttgagtggggacatatccatatcagcattgaaaaaatctatatggcttttttctccccaatcaattttttaattatgaaaattatcatacatacagactttttttttttttgagatggagtctcactctgttgccaggctggagtgcagtggcgcgatcttggctcactgcaacctccgcctcccgggttcaagcgatcctcctgcctcagtctcccaattagctgggaccataggcatgtaccatcacacccggctaattaaaaaaaaattttgtttacaagtagggccttgctagattgtccaggctggtcttgaactcctggcctcaagcaatcctcccaccttgatttctcaacgcactgggattacaagtgtgagccactgcacccagttacctgccacctgctattgcatgtagataaatttctaaatagaaagaaaggaatagatgtaatcagttttcttatcaagaaggaagaatattctgttttagctgagatagtgttgatgaggaacgggattgcttcctctgtggaaaaaggcatgatgacagaggacccccaaaattgattcattgtggagacattggcctttccaattgtcttatgacagtaagccaattttatccctagtaggagtcctcaaggtaaaaggcacagagtatagaacattggtctcattttatcaggcaagtttaacatacaacaatgttgctcaagggacagtggaggaggattgattttctcctgagtgatgctagcctattaagaagtgggcactctttgaaattttggtaatagtaattgaaagcttaacatttttttctgagcttatttcatactatatagtatttccaggagcagagaaagccatatgaaaataaaaggcattgaacaatttttaaaatgtattcattcgatcaaaatattattaaggacttatttgtatcaggcactttgctggattgaaggtggataatttattctcaaagagctaaccgtctcttcactaaatataacaacgctatagaatgagattttttaaaaaaacagcattgcaagtatgtagagaatattatgggagcccagagaagcagcacatgccatgccacagactggcgtaggaaggattcctggaggagggcgttcctgagcctgcctcaaaataggcagaagaatcagtgttaccaagagggaagggatcaggagaccactagaggggacaagatgagcaaaatgtgtgcagttaagacactgcacagtttatttgggagaactggtgaaaacctgttgtgtctcggagagaaaaggagatggtggtagataaggctaaaaaggtgggcagagaagcaattagatatcagctcctgtgccagggaaagagtttggattttatcttttagagtttaaagagattcttaacttttctgggtcataaacccatttgagaatgtgataaaaactgtcaaccttctctccataaaaatgtacctttataaacgcacttaaaattttaaatattatctgaggagtttatagaagccctgagcctgtctatccatggacttccccttgggaaccagctatttcagacaaattcttacgtacctcattgtcctataagttagcatggagagggtttagtgatattcatagataggagcttcacatttagttatcaataacaattatcaaacgtggggagcagccaggctcttcattcataatgaaaatagtgatcatggctaatgctgacagagtctcaccatgtgtccagcgccatgctgagtgattatgtatattaacttgtttgtttttgttttttgttaacttgtataacaagctcacaacaattctgtaaagtagctattcttatttttccaatatctcaggtgaaaaaacataagcacaaggtattatttacagctagcaaggtacagagatggcatatacccagcattctggtcacacaggcactgtttcatgcccttaattgctacattatcctctccctgagaaaaacaaattgaagcagtttctaatgacaagagcctagaccaattggccatagatacaactcagtatgcagatcttacgttgtgttcattgaacttacatcttagatgtacagattgctgcccttgaaagcactagttcattgtggctacattcatgacagaactttgaataggttaaatgtggctttaagattattagcagcaacacttaatgctgcatgtcatccaggttgtcttaaagaattttatttctaaagctaaatagtgtataatttttaaaaaattatccttaacatacacttcatttaaaacaatttatgaaaccaactctaactagaacttagcataaaatttgatgtgcaacattaataaatcgatgctcaaaatttcattctctgttccttttatctacaatgctttttacttggaaatgtgcatttataccccaaaaaagaagctacatgaacatctcaatagatgtagaaaaagcatttaacaaaattcagcatctgttcatgttaaaaactcttaaaaaataagtatagaagtgaaaaacaagtttattgcaacagggctcttctagaaaggaactagacacaaagaaagggaagcattcataactgaaatggaactaggagactgtatatcatatttaattagagcatagatatttcataagcgagtgtatgaagaagcaacatggcgtcacaatccggtggtttgttagggctggaaattttaaattacttcatacaagtttaggtgttctggggcttctgactctgagtgggaagtttgaggcttgactgtggtggtatactgactgccaatcctgaggaactctgtcagtctcagtgtcttcatttgtaagactgaaatgattcacattaatttcatgaaaattaaaatgtttagggccatgcatataaaattactattgtgttttgcttttgtttggtttctttactttgggcttctagtggaaatagttgcattaatcatgctccttatttcatggcacgttatcatcactgatcactttgtttcattgtttggtttggatttgctgattattttttctgtcgttctctagatttcctttacattacataggaaaccatcgtaatatatcattttatctttttgtttgtatgtgatttgcaaaatatattttgtttttatgactttttaaagatatttttatacataccaaaccattctactataaagacacatgcacatgtatgtttattgcggcactgttcacaatagcaaagacttggaaacaacccaaatgctcatcaatgacagactggatcaagaaaatgtggcacatatacaccatggaatactatgcagccataaaaaaggatgagttcatgtcctttgcaaggacgtggatgacgctggaaaccatcattctcagcaaactaacacaagaacagaaaacaaaacaccgcatgttctcactcctaagtgggagttgaacaatgagaacacatggacacagagaggggaacatcacacactggggcttgtcagggggtggggcgctaggagtgggagagcattaggagaaatacctaatgtagatgacgggttgatgggtgccccaaaccaccatggcacatgtatacctatgtagcaaacctgcacatgtatcctataacttaaagtataatttaaaaaccgtaactacagtgccattattacacctaaataaagttaaaaatcattacttaatatggtaaaatgtagtgtttatgttttctccattgtttgttatgttttctccatagtttgaaaacatagtttattatgttttctccatagtttgttatttgaatagggatccaaacaacatccacacgttgcaattggctatttctttaaaatccgttttaatctataagtctctctgtctccattttttcttcttctccttctttgtcttattcttctttttctcctttaactttttttttgaaaaaacattgtcatttgttctatggagttttccaaaatctgaactgattttatggcactatgtcacttaataatttctgtttcctctgtatctgtgtaattaattctaaagctgtaatcagaacagttaaaaaatgtctgtgggggaagttctgatataggtggtgatatggtttggctctgtgtccccaccattcaatctcaccttgaattgaaataatcccatgtctcgagggtgggaccaggtggatataattgaatcatgggggcagttaatgctgttctcctaatagtgagtgagtttttacaagatctgatagttttataagtggctttttctcctttgcgtggcacttctccttcttgccaccatgtgaaggatgtttgcttccacttccaccatgattgtaagttttctgaggcctaactggccatgtggaactgtgagtcaactaaacctgtttcctttataaattacccagtctcggacggttctttatagcagcatgagaatggactaacatgataaattggtcccaggagtggggcgctgctgtaaagatacctgaaaatgtggaagcaactttagaactgggtaataggcagaggttggaacagtttggagggctcaggagaagacaggaaaatgtgggaaagtttggagctccctagagacttattggatggcgttgaccaaaatgctgataatgatatggaccatgaaatccaggctgcggtggtctcagatggagatgaagaacttgtaggcagatataagaattgttaacgtgtacccctgtaggaaacaactttattagctcgagtgcagtagttatgtgcaggtccttttgcctttacttttacggattctattcatttccaaagttaggtcagtacctttcttaccccatacaatgaggttgttccatatatttgtaatacaattagattttcttgtcacagtctacattctttgcggagatcctccaactttctaaatgattttttaaaatttgaatacaataacgttcactctgtgttgtgtaaagccctataggttttgataaataagaatcctataatatcatgtagccaccaaataccatgaagtatagtttcaagaccctaaaaatccctcgagctttgcatattcattgctccccacttttcccatacaccagggagactgatcgttttagtcttcttatagtttttctttatccagaatgttatataattgaaataatacagtatgtagtctttttagaatagcttgttttgtttagtgatgtaaatttaagcttcattcatgtcttcatgtcttttctgacgatctttttttacttagcattatatttttaagatctatctatgttgttatgtctgcattgattcttttccttttaatagcactatgtgatggacaactagtacatttgcccatccactctctgatggatagcacattgcttcaaaatcttagtgtcccaacccaactcagctctactaccacaaataatgtaataaacagactcacatatatgcccttaaggacctgtgtatttctttgggatatatacctaggaaggaaattgttagaacataagacatgtccttgttttatttgactagtgtcagattgctatctggaatggtcttagcaggccagcaacatggttttttttttttttaatttgtgttttagaattagccccatttccccaccaacatttcatattatcaaaatttctggatataagtatataggaatcatgtggtaactcactgtatttatttaaatttctataattactaatgagtctgaacacctcttcctgtgggtactagattttacccatatttatatgtagatgatgtattttttaaactgatttgtagttgttccttgtatattttaaatatgaatatcatgtcagtttttaacattacagaataccttttctaacaccatcatcggtctgttagctttgttcatgatgccctttgttgaacagatttatcagtttaatctttggcttgttggatgacggtacgatttacaaatattctgaaaaatgagagagaaatagggtaggctagagtggggaacaggagtttctgtttggctgtattaggttagagatgcattgaaccttcaggtagaattcttaagcaagtagtcagacatgtgaatctggcataaagatgaggttttgttagtatcaacctttaaaattgtttttttgtttcttgaaggttttcttcttttttttaaactggactttgttgtttaaagctattgacaaaatttctacttaataaattggagctgggagcagtggctcatgcctgtaataccagcactttgggaggccgaggggggcagatcaactgaggtcaggagtttgagaccagcctggccaacatggtgaaaccccatctctacaataaatacaaaaattagctgggcatggtggcatgcacctgtattcctagctactcaggaggctgaggcaggagaattgcttgaacccaggaggcagaggttgcagtgagccgaaatcgcgccactgtactctagtctgggcaacagagtgagactccatctcaaaaaacaaaaaaaaaaaaaaggaaaagaaaaagaaaagaaattgcagaaggcactttgaattgcatcatagtggatttttttattttgctacatatataatttttatcatattttttatcccaaatatttaatcaatatatagtcacggttcccaaagaaatgtgcaattccaaccctatgtgtcctcttcccctctggcccccttagcttgtttcaagggttctctggatatatttcatagaacattttactgttccctttgtaaatggtgatatttctccattttacatttagattctaagaaacagttcaaggtgactctcatatttaaattgaatatggaaatagatatttttgatgcaaatttataatatgttcatgggattaagttatcaagcattgaatattatattttcaagaccatcttccttgagaagaaaatgtttatagacctgtaggtgcgtatccttttttacatggtaaaaaatacttcagaattattgttaataaaaataatactttaattgatgaggtttttttcaatagaaataggacactttcatacaattcttgtcaggtctttgatgttagaagttgatctttgacaactgggcttgaaaacaacagaaaaaatatttgaatcaaacattaatagtaatatacttttttttaaggttcacaaagataattaattttagattcctctcacactatatttcttttttacaggatttactttccgttttcatataaaaaattattcatattatacacaattgtatatctgcaatttgactttttataaattgtaaccaattcattatcacatgtatgtacttttggttgttgtaaataatcctaaaatcctaattaggatataaaattattaatacatatttacaatttatatcctaaactatatttatagtttgatttttattatgtaggaagaaagtatattgtcttagctatttaagtttgtagaggtaacattgtctccaaaaggggatgtgaccatcctagaaaagctaaaataaagaaaatcttccttttaggtacagagaaagaaaaaaacaacaacaaaacaaaaatgccttgtattgctttgctgaggactcataaaaatgactggtggtgctttcaggcatcattcatcaggtttacattttagagaaagaaaaaatctcattatccactccgtactcatttaacttttaagtgcttagaagatttgtcataacctagactcaagctctgaaatggtaaatcttgacacatctcaattttagcaactcatcttagcagtgctgaaacgctgagtgctcataggtacaggagctttatattctattttgccctaattctttcacattttttatacatcactcctaactttataatgttgttagcttttacaccttcctttattttaaaactggattagtctaaaagtttcctattcagtaagaagtaccaaatgaactattgagcacgatgcataagcattaacacatttaatcgtggagggcaagtgaagagtacaattcaaatgggtcaagagaactagatttctatgaggtcattaagcattctatttaccttaattttgtgctcttatgacactgccctttgccataccatgcagacttcttatgcagcagaaactgtagaagtttaggctaggggagaagggactgagaacctatatgtttttgttcattagtatctgaaaagtgatgagttaaaatgtgtggctacttatcttaaaagtgtatatatatatatatatcatacatatcattcttttacttgcaaaagtacattatttatgataacatttagatactaactttcctcatttgaggaagtagtagtaaaatgtgtggctacttatcttaaaagtgtatatatattatatatatatatgtcatacatatcattcttttacttgcaaaagtacattatttatgataacgtttggatactaactttcctcgtttgaggaagtagcagcactctttcccttcagaatacttttttttataacttgcttaaattgaatgaggtcatttattaatactcaaagctaataaggcatcatcctgtaactttcagaagacgaatataagtagaaactatttaataggggaaaaactgcctggtttttaaaactttccttttatactttgtaatgtcagattttttttcttaacaaaaagaaagttggataagacaactccttcaaaatgaatcctaatttatctctattggatgcatgtgcaaacctagctcctgttccaccagtgtccaaaggttataaaaaattgaacagctaatttttaagtagtatttaaaattcattgagaatgtaaaatgaccacaaaattatatttttccgataacttcttatatccactgtgatgtccaacttagagtcagaatgtaagggttcacattttaatttctacttggacagtatgcccaaactctgtactgtgaatgtatgtcatttatggagatgctaggatgtaaaagcattcaaattacggtgcttttaagacaaacagcaatttggtattattggttattctttctcctacactaggcactatacccatttatttggtctatgttttcacaacagccttgagattttcggaaagtgacctaacaatcctgtatagactggtcttaggatggggaccaaggctgaacctgggtaatatggacagaggtgaatttgtagtaatgtgtttcatgtaaaagcaatgcatacaagttttgacccatcttctgctttttgttttttttctattggcttgtctggcaaaattagagaataattaaaggtgaaaaacaaagcctccttcctcatacagcatacctgtttaaaaatggaagactataaaactaatttcactcatcataacaagaaatatatctatgatagtaattgaaatagtgtgcagcttgatctctcattaatactttggtaatttataagaaaataacagtatcaagaaaatgtgaggtccatattatcttatgttttttcactgcttcccctcccaaaaacataccatattagaagtcaaattataatcagagggctgatggtcaagaaggaattagcgtgataggagtgagaggaaaccgatgtatgatagtatcagattttaggaaaattgatgtgctcattctcatgctggggatattcctcccagtgggatgggaatgcttgaagatgagagtcttctgtctactcccctttttatcctcctccacatgagggttgattttgctgatgtggctaaaatacttgaagtcagaggcaccacgaagtctagttctctacccaaggttacattaatagttagagacaagatgtggctggatggcaaatgcctttcaaggtatgtttataaccagggaatcctagaattattctgcccatttcaggtcacattttcctttcaggcatgtacaatatgaaaatcttaattcagcaatgaggccattggccttgttttaacctgcacattgtaagaatatgggttatataaagcggcagaggaatgatcgtacctggactgctaaaatctccgtattcagagggtaacttcacaaaatttggcaaaaataattgaagagcagtggatgacatatttaattatctctttctctcaatgaatttgttgatgagtttcagtctatttcactctggggggtagaactaccaaataagacattttgattaaaatataaaaaataaaattcaacaagtctgtaaatgactatttcagtgtctctagcaatgtgtaaaggagcaggactgtatttctcaatgaaggtaactttttagtatcaaagttagaatttgactgttttgagattctgcattgagatgtgaagttatctgttaattattttacttgaaagtgtattttaaaaggaagatgagctgtgtccccacccaaacctcaacttgaattgtgtctcccagaattcccacatgaggggtaattgaatcatggggaccggtctttctagtgctattctcgtgataatgaataaatctcacgagatctgatgagtttctcacgggtttccacttttgcttcttcctcattttctcttgccactgccatgtaagaagtgccttttgcctcctaccatgattctgaggcctccccagccatgtggaactgtaagtccaattaaacctctttttttccccagtcttgggtatgtcttcatcagcagcatgaaaatggactaatacagaggaaatatacctttacctgtgtttcttacttggaggaaagtgtcagtcattttcaaaattttgaattatttaaaattaggtcagtgatgtcacagtaagttaacttatattgagtaaagttgattttcaatgagaaacagttatggtgttaggtgacaaaaaagatttctacaccaaaacaaacccaaccatattctggcctaaaacttacaaataaatacttcttggaaatttaagccaaccattttatgttatggaaaaatcttttgaccttctcagtaagatttaacaaaagttttttttttgtttgtttttaatgacagagtacaggattagtataggttaattaatttgttaatttattgtttgttttatttatttattttttgagatgtagtttcacttttgtttttcaggctggagtgcagtggtgccatctcggctcactgcaacctccccctccccagttcaagcaattctcctgcctcagcctgccgagtaactgggattacagatgctccccaccatgcctagctaatttttgtacttttagtagagacggggctcaccatgttggccaggctggtcttgaactcctgacctcaagtgatccgcctgccttggcctcccaaaattctgggattacaggcgtgagccactgcgcctgaccagtatagattaatttataatttatggtaacaggtttgtaagtttgtttatcaagaagtaatggctagctctgagcttgttgtcgcaacactcttgtactaacggaggcccattatttcagggttcttcttgtttctaacactgacacatagtctctgtctttacttacttatttcttaatttctcagttatattttgagctactctaaggattgagactaatcatgttctgttttctgtattcctaatccttgaatatctttctaaatccttatttacttgtattcaaacttttacagttccataccaaacattcccttttatagaatatgacattaactttgggaaaaaaaggccagacgcggaggctcatgcctgtaatcctaacacttttggaggccaaggcgggcggatcacctaaggtcaggagttcgagaccagcctggccaggagttcaagaccagcctggccaacatggtgaaaccgccatctctatgaaaaatacaaaaattagccaagtgtggtggtgggcgcctgtaatcccagctactctagaggctgaggcaggagaatcacttgaacccgggacatggaggttgcagggagctgagatcgtgccactgtactccaccctgggggacagagccagactccatctcaaaaaaaaaaaggaaaaatgtactcctctttttagaataaactaataatattggagagaacaaagctactaaatatattaatacttcatggcaacatgaaaccattacctgcatggttacaagtcaaatgcatggaatgaaagcaaagtttttcatcagtcagtggttgtgactcttacactagctttcaactctttcctgttaaccctttgttgtaatcccctattctctgtttgcatatttttaatgcctccctttttgctcgttcaaattccaaagaagaatatcttgtgtttacatgacaactctatgctgttgaacagctcagtgggatacttttgtccccacagccatttaggcacctaaagtgttttaggctctattattatcaacatagtttccagagttagccagggttcatgtctatttcacacagttaaaaaaaaaaaaaaaggagaaatgaaggcatgcacatggaaggctgagaagcagtgtgcatcgcacctcgcattggctactacgggccactgctggggagtctaggatgtaccctagcctcctttgccacgaagctgtattaatattctctagcagataccacatttggcagagtaactacaactggggctactacttggttgagtttgtagtacttcgtcattctctcacatctttctgatttttgttgctgaccagagtaaagcattaaatgaggatgtgagggagtcactctttaagagtgactctgatctctttctctcctggattccatgttatctttaaattatcttcttaatgaggaggagagagaggagtgacagtttcagatgcttctacctggccttcctcactatagtagcttttatcccacaggccaaggaaccagtgtggaaattctgccaactattgagtatgttcattctaaccatatagtcaagcaccagatagttcatggactgagtgggctcactgtgagccagactaggtcacggactccgtttattactctccctaccccatctacccccactttgacagtgggccacaatgatgcttcaggtccctgggtcttaatatcaactcaggttcttattcagcagtgatggttcatctccatgcaatgtatggatgtcctcctttgcccagtggttaccccagaggttcccatggtcacctcagtaaacacttgtggatctctttagggaaggactagggaatcatcagttatataaatgagtggacagagtccttcctcctgagaactcatcctctctttcagtttatactgaaatatataccattgtttatacttctgagaactggcttatggccagaaatggggcaaaaggtcatgaatttattaactgatttattttaatcctataaatgaagcaatatttctgttgcaatccatttatcttgtctcctggaactttgtgtcctagtaaccatctccaaagttttttgcggttaaggtgcccctggctgtaactagtcttgtcactagttctgataattgagcctaccctgcttttgacagttagtggccatcatctggtctgttatggtaggatcctgtcatctcagttgctctcctggagcccagttctgtgtagcatcttctaccatttgcatcttttcttaccagccttagtctatagaggacagcttccacaggacttcttttggatgctggtatccctttcactagctcattccttctcacttttgtcctccagcttctcatagaacagagttaactgatggactttggcttcgggtggcatatctactctagcgtgctcacttctctgagcctttggatcccttccatccttcgccatttgccattgaaattctagaaatttaaatttcatttacagtaaaccatcacttcttcccaactttccagagccaactggagttttattaccactgtctactagagtcctctgtagggtggtacattctctgtcatgccaaagtgcttcattatccataaactagcccttatcttaccttaggtttcaccctgtttgatccagcatctttggggaccagtccttagctctattggaatgtagtcccttcttccctcagcagtgccagccctttcatggctgggttatgttggaccttcacctttgttattgaactggtggccaggaggggataagaggggtaaatctggaagggtgacatgttcccttataaggcagaggttctaaataatctcaaggagaaggggagtgctagctgttaactggaaagaaagagccacttctgaaatctgtagatttcagatgaatcaagcaatgcaaagcttttttttatgtatttatttatttttattatactttaagttttagggtacatgtgcacaatgtgcaggtttgttacatatgtatacatgtgccatgttgtgtgctgtacccattaactcatcatttagcattaggtgtatctcctaatgctatccctcccccctccccccaccccacaacagtccccggtgtgtgacattccctttcctgtgtccatgtgttctcattgtgtatatacccaaaagattataaatcatgcttctataaagacacatgcacacgtatgtttattgcggcactgttcacaatagcaaagacttggaaccaaccaaaatgttcaacaatgatagactggattaagaaaatgtggcacatttacaccgtggaatactatgcagccataaaaaatgatgagttcatgtcctttgtagggacatggatgaagctggaaaccatcattctctgcaaagttttttgagttcttgaactcagattttcctattctgtttttctgggtcctactccttcccagttagttccctgacctcgatgtagcagacttgggaaaaagaatatgctgagaattcaaccttcaagggagctctgctacctataatgaagtcctagacctaatcctcagcttttgataccctgcaggagatgggttcctttacagacttccaaggacgttcactggatttagtgccattcatacctactcattggagttctctatcatgtgtgccttacaacagcacatgtatagtgctatacaatgaactttcattcatatcgcatgttgtgacaactgctgccttttgaattgatgcaagtgcttgttctcatattaaaaccatctcagttattggccatgacaaatattacctcaattttgaaaattaaggaattgagacacagagagattaatttaactgtccaaagtcacacagccaataagtagcagaatagaacttgttcccaggtagccaaatgccagagtctatgctgattctcactacaatgatgctgattctcttggtgctgtttgatgccaaccaagtatgaattgaaacttaaatatagcaactgaaatcaaatgccagtattttatgataaaacagacatctggatgaaccttaatatgattatattaattttattgagataaacagctaaatgaaaaagcagcatttcattatttttataaagggtgtattgataactcgtgagttgaaaacatggcagcagattaaagattcctgtttttcacattgtatggctttcagactgttcaccaggtgtataagcacatttcagaagaaatgtccagctaccgtgactgagctgctaaatgccaaatatttttaaataatgttactaattattacaataaagagttcccatgacctacttcttaattggccctgcaacaattactgatatctcatagagaaaaaaacacaagattttttcctgtcttactctatttgtccttaattttacttttttttctaaattgttagttgcctatgcatctgtgtgactattttcacttgccgttgtgtcatcagctggtattatagtgagccaaaattatccacatcttcttaagtatggaacagctacatcgtcatagaacttatagtgatggacagtcactaagtttgcgattgcgttaaatttgaatttggagaacgaaagaagagaggttattaaaatgccagggacacacaagagccggaccttttttaaaaaaaaaatctcaaaggcagtttcttatagatgactttagaaattaagccctaaaaacatccttggtgcactggtctttctaagtactggcattcagcaatgaaaatgcagtgcttttcttgtccatgtctagaggaaaaaagcactatcagttatttagaatctgatttataccttaagagagtggctgccactctctgtgatttcagggaagtcgggtatcaaggagcaattttcaaagaattgaaagccgatgcagggttatgaataaactctgagaggtttgaccttccctgtcaaacgataaggccataaatatgttggtaattctgctttgttgtgagcacctgttctttttcatcattgtggagtttctaggataccaaaaattgataactgtaaaactaaaatattttattgtattaaaaatactagaaaagtagacaatacagggtagagaacagttttttgcatgttccttttgaaatgtgtctggagttggaccatccaattttgaaaactttacaaggtccaatcaaattcagtataacagtatggtcatattttaccatttatttgaatgaagacagcataagtggtttttggacaggaacggagatagttaatgtataatatttttaatgcttttttccccagtatgccaaattcattatgacatgtggttcattcttgttcagatggaggctttgtcagcaatcacatacagtacagtgtgtttgagcattttcagtgctgttaagcgtaaagtgttctgttttaatgattatgtttccatcttcattaaataactgttgaggaacctttattctctgacttcactattacctttctcagactgatagcccaggagaaaacaaagataagcaggggaaaaaaaacagtccagataactcccagagaagaggagggaaaattggtcattttcttttattttagaaacaaaaataaataaataaaacttcttattttttacaattttaagagacccttaaactcttttgaacaaacacataaaaaaacaccaaaaatgatttttctgttttatggtggcctaaaaaagcagaaagagcacaaggaatgacaaggaaaaaaggcagtgggcatacaaagataaaatagtgcagacaaagccatctggagagggacagcaagagattgagagtgtgttagttatccattgctgtgtaacaaattgcccgaaaacttggtggcttaacacaacagtaaacatttattatctttcaaagcttctctgtgggtcaggaatttggtcttagctggacgttccaagcttagggtcttgtatagcttggttgtcctggtgtcaggcatcagattccatgtggctgacaagttggtaccagctggtggcagcgatgggtgtgaggttggattcctctcaatacggacctctctaaagggctgcttgagtgtcctcatgacataaggattggcttcccccagagcaagtaatcttcaatagcaagcaagagggcagctgtattttttttttaatgatctagcttcagaagttacaatacacccgcacttctgcagtgtcctgttggtcatacaggttagcttattcggtgcagggaatgcaagggcacaaataccaggaggcaaggttcactgggcgctgttttggagcttgattgccacagagaaatagggaagagagtggtagacaaacacagacacacagacctttatgaacaggagaggggagaagactgggtagttgagtcaagtccagggtgagggtgatcatgttctcctgaagtgcgcttggtttgtgacaagtgtaaaggccgcttaatatcagttgttaattctaacccaacttgtcacatctagtatgcttaattgtactctcattacaataatctttctagcatcaaaatggaaagcttagttgtattaaggcatatttttctcagaaatattaccacaattttaccttaaaggataaaaatctatatatttcccttccaacacacacacacacacacacacacacacacacaccccagtatcagtgcttttacatttctcatgtcaaagtatctgatatagaagaggtatcaaaataagaccactataacaatgaagattgtaatctacataacttgaaaggagtgtttattctgacatttttgcccaaacacagtaggttgtaggttatgaagtacttctcaagttgctttcagaagacaactgtatcccaacattcaagatccccaaaatgagaggcaggtacactgactttctaaaagtaaaagtaattaattgtgttacctgtgatttaatccgtttgttttctaaacataatgatagcagatgtttttggagcatttactctttggcaggcactattctaagggctttgcatttcaagccattaagttcccaaagcaacgtttttattctggttttgtagttaaagaaaatgaaacttagacatgatagaaagggattgaaatccatgaagtctttctctagcacctacaatactctgtctgtctgtctgtctgtctgtctttctgtctgtctgtctatccatccatccgtctgagacagagtcttgctctgtcacccaggctggagtgcagtggcatgatctcgactcactgcaacctccgtctcctgggttcaagtgattctcctgtctcagcctcccaagtagctggaattacaggcacccgccaccatgcctggctaatttttgtatttttagtagagacaatgtttcgccatgttgaccaggctggtcccgaactcctgacctcaggtgatccacccgccttggcctcccaaagtgctgggattacaggcatgagccaccgtgcctggcttacagtactcttaatggtcacgctgcatgcagggtagattaacccaggcaagttcaaaagaaggattcactaacaatgacagtgatttcctcagactccatggacagaatctatagtatccccagacttctcaagagttagaaaaagaaaatggaatgctttctgaaacctgggagtgtttctcttgagggaaggggtcagcctggaggtaggtgggtctgatttactttttaaagggatcattttcaactgctggtttgggaacagactctagtgaggcaagaggagaccttattatggcaaagtgcacagggtggtaatgaatgagactgtgagatgtgataggaagtgataggaattctgaaactatttagaatagggtcaataagatttctttatgggttagatgtggggtatgggaaaagaagaaatcctttggcctaagcagttggaaagatggagtagctctcaactgagatcaaaagctgtgaatggggtgggtttgaggtaaaaggtcaagatatgtaaaataggcaattggacatgcaaaagcagagtttgggagagaagtctgagctagagatccaaatttgggattccacaacatctagatgattgagatcacaaagagtgtgaatatgggcatatgagggaggaggatcttgctgagagtaaggagtttagaccctccatcattgagagtttgaaaagaaggggaggagccagtgaaagacacatgggttaagaggaaaatcaaaagagtgtggtattctggaagcaaagtaaagataatttatcaaaaagagagaatgataacccattgcaaacactgctgataggtcaactcaaatgaaaactaatagttgaccattgaatttagcaacttggaggtcattggatttctcagtgaaagccagtttggaagagtgatgggggcaaaagcttatttggtatgactctaagacagtattaggtcgttcttgcaccactataaagaaatccctgagactgggtaatttataaaagaagaggtttaattggctctaggttctgcaggctatacaggaagcatagcagcatctgtttctggggaggcctcaggaagcttccaatcatggcagaaggtgaagggggagcaggtgcattacacagcaaaagcagaagcaagagagtggggggcggtgccacacacttttaaatgactagatctcacaagaactcactctcacaagaatagcatcaaggagatggtgctaaaccattcatgagaaatcgaccctcatgatccagtcacctcccaccaggccccacatccaatgttggagattacaattcaacacgagatttgggcagggacaaatatgaaaactatatcaaagacagaatagaggagaagaactggagacagtgaatttagacagtgctttctaggaatcttaatgtaaatgggaacaaataaatggggtagtaaggtggtagatggcagatgaagaaggtcaagagttgttatatggaaactactaagcttagtgttttccttttcataatatttattgtactcctactgtgtacgtaatactcccagctcctcaggaggctgaggcaggaggatcacttgagcccaggggtttgaggccagcctgatcaacgtagccagaacccatctcaaaattaaaaaaaaaaaaaatcaataagatctgcttctctccttgaggcatttatcttctggtaagggaattagacttgaaatagtgtgtgtggagagcagaaggtatgcaagtagcccagattacaagttcaacaaaggattctgagaaggatagtggattcggtggcatctgaactgagtgttgggacttgtaccatctgaatattaagcctacctgcttttcattaatattttctaagattgggggagaggagaagcaaaattgtcctgtttgttcttgctttatgatactggattttttttaaaaaaatgactattgtatctcagttttcttgttcatagcccagttattgattttgctttaaccattctttgtgaacttctggaaaacccaatagacatgttttgaaaacatgaataagtgtttcacacagacttatctgcatcctccgcatattcagtcaccaacacagaacagcgaaatgaatggagacataacatagtaaataaagagaatgggacattctattgaagatacatggatgaggtcaaagaagataggcattcactgacttattcattcatgtactgtatgagtatttattatttaggataaactttaggcaaggtcatgcagaagcttcacttggaaagtgaatatagggaacaaaaaggaagaatggggaaaaagcaagcaatgagataaatgggccagactggtttttaaagttagagcctagaaatacatgatgacatagtaaaaacaagtgggctttaaaatcacagcatacttgggttgagatatcacacctactgttactagttgagttatcctgaatgagttcatgactgccctgagtctacaatctttattttagcagtaattctaccacacaaggttgttacgagaattatagtgcccagcagaatatttgcaccaagcaaatactcaaaaattgtttcctcactgctatggtctgaatgtttgtgtctcccctcccccgtgcaaaactcctatattgaaatcctaaaccccaagtttggaaatggggtctttaggagatgattaggtcgtgagaatggaacccttgaatgggatgggtacgcttctcaaggaagcctgagagagactccttgccactttccccacgtgaggacagactgagaaggtgccatctgtaaaccagcaagcaggtgctaaccagacactgaatctgccagcatatggatcttgggcttcccagggtccagaaatttgagaagtaaatttatgttgtttataagctaccattttgtggtgttttattctagttgcccaaataaagtaagatactcatttttcttttcttttgtttgtgtggttttttttttgttttgttttgttttgttttgttttgtttgagacgaagtctcgcccttgttccccaggctggagggcaatggcgcgatctcggctcactgcaacttccgcctcccgggttcaagcaattctcttgcctcagcctcccgagtagctgggattacaggcgcctgccactaagcctggctaattttttttttttttttttgtatttttaatagagacagcgtttcaccatgttggccaggctggtcgcgaactcctgatgtcaggtgatctgcccgcctcagcctcccacagtgctgggattacaggcatgagccaccacgcctggacaagatactcatttttcgccccgttttttctttaactagatctttctcattatttcttccaggttacagagtttgatagtcatgctggttttcaaaataaataaatgcaaatttgttgtctttccctgcacactttcttcaggaacactaacaatatcccatgagcattattaacacgagtgaaaaaaatcacgagacacccaacattcagttaagcatgctgaacatcagccataccacattctcagctagcagaaacgctgcctggagtttgataatgaataggatcattccagtagttctccctacggttgaaccatctccccgcttatcctccattctcctgccagtcttaatgacttgtagcttctgagataacatcaaagcgaagtgcatggggattgatgaatagctcatctgacaaaagatggggggttcaggtagaagggaatgttagtgcttacagtaattgtgggaagctgattgtctattgaaggggactctctttggtagctcttttatagtaacaaagttggagcagttaataatacaggaagaaagttgaaatatgtattgcagtaacagcattccaatcaactcttttacaattatagaaaatgtgggaaatacgttagtatatttagaatctgaatgaaatattacttaaattattactatcactaaaaaaaagataacattgagttatcgcagtatttggctaaattcatgttgagaattccaaaaaataacttgaagaatttcacattgggtttagtgaccagatattaggcttcagaaggagttcttagaactttttttaaaatgatgaacaaagtaaaagaggtatgctcttatttaaaaattcatttactaaaaactagagcttctgtatgacaaattggagaaatgactctccttaagatatcttaatgtcggctgggcaccgtcgttcatgcctgtaatcccagcactttcagaggctgaggtgggcagatcacgaggtcaggagtttgagaccagcctgaccaacatggtgaaacgccgtctctactaaaaataaaaaaattatccaggcgcggtgctgggcgcctgtaaccccagctactcaggaggctggggcaagagaatcgcttgaacccgtggtgagggtggaggttacagtgagccaagatcgcaccactgccctccagcgtgggcgacagatcgagacgttgactcaaaaaaaaaaaaaaaaaggaaggtatcttaatgtttcatggaggtatagcattaaaatgtttttcttttcccttctttctgctaatattttacgttagtcttatgagggctaatcacacttatttttctttaaaaattactggagcaaagtggccaggtttttaaaaaaataaaaagcagaaaggaaagaaagtgtgggttcaaattaaacctggaggagctgataaatggagaaaagtaaatcaacatatataatatgagtgcttgaaatgctattcttggcacgttcaacgtgttatttcatcctgaaaataactcagggaggtaatattgtagtccgcattttacagaaacacataaaattacattttaagtgtatttcaagcactagtgacagggtcttcatgattattggtgtacagtttacttgtatccaattaagcaaacattatctagatcggggtgtccaattttttggcttccctgggccacattgcaagaagaataattgtcttgggccacacataaaatacactgacactaacatagctgatgagctttaaaaaaatagcaaaaatatctcacaatgttttaagaaactttacgaatttgtgttgggtgacattcaaagctgtcctgggctgcatttagcctgtgagccgcgggttgggcaagcttgatcttatcaaagaataatgggtctgtctcttgagtcctttcagttcacctggaccttccctcatctactcagatactgcgagaagatttttcaaagcatattgacaccttttcatcaatacgttttctttaaacaatgaaacaatcaggtatttatttgatacatatgttccttccactgtgctgtaagtccaatagaaaaaaaattagattcttgttcttcaaagaaagtttattctttttagggatacaacatgaaactatttgagggatgcaatacagtaccaaagtgctacattttgtagcataaataattaaaattgtagcattcaggaggaagtcatctttgctatttagaacacatagggagatttcattaaaaaagtaaagcttgcattttgctttgatgtttctctggattgaggatggagaaacagtatagaagcagacaggagagcatgggcatcctgatcagatgctatgttaagaaaagcatttatctaaagtaatttgaaaactctgagatcacactaactcaaaatatatctttcaatgcaacctgtcctgtttctgctgtcagtaacgcttacttctgggataaatattgtctctagaagtcatcatttaagatgtctatatcttttgaagaggccaaggttgggtttttctctgactggaataaaaggaaggcatgaagataagatatgatccattgtaaaaaaggcataaatgcagaggtgataacaaagcagagacatcagtgtcatgttttattttgtaatatccaatgtgaagcgattgataaggaaattagcctgtcattagagttatttactatctctaaatgtaggcatttcatacatgtttttgacttttgaataaacaaactaacttaactacattaaggttttcttttggataactgttgagtattgtcattaaccctttaatagtacagctagctcatgtcagaacacgtatgtgatttcagccagaggttattgactaacttctaaaacaaaaatcaaatggaagttattaagttcaaaacatattcttgaaatgttctgactatggaaatattaaaccaaaatatgctagttttgggtgttgtgtgaaaaatattattcccaatcaacattttcctaagtcgatttcatgaaatgaagcttccatgggaaattacgagatgatatttgagcagcagaggaaggttctgtggtgaagtaaattttggaaatacttattcaggtaaacagggtttgtgtttacttgtttttgctgcaagattgcctagaacatctaacatgctggcaaaaatcgtggtttccaagaggtgaattgacaaagcgatttttccaatctgtatttgaccctgggagtaatgttctatggaaagcactttagaaaatgttctaacatgatttgaaattctaaaagctatctgtagataacatattaatgctttttcaaagggaacacccctcaatttaatatatatacatgcaacattaatttgatacaggctatttcaaatgaacccaatacacttttattttgaattccacatttgtggaacagaatcaaagaaaatatataagacttccaactctgaggttttacaactacaagttcactggggagaccctttatcttgtgactactttcagctatgtgagcagtcacagtatgaaaatataccagcacaaaactctgttgtgtaggagaagtaaccttttttcctgctaaatataatgtagatacttctgtctacttcttttactcttctttcctgcaggctatttaatttcctgcagtgtttgttgataaatttttaaagtacctggaccagctaacaaaaaatgagctaccagagactggccttgtgtttaatccgtctacagcaatatttcattcatacagggtctaaccgtgtgccactaattgtggctgccattagcctcagagtgtaggttcagcattaacaacaacttgatgaatgcatggccactttataaactagcattggcagcttctccttgaattgtttacactaaatctaatgtgtttatgttctttttctgttcagtgctttctgaatgatcttgttaattggctgtatattttgcgatatccacactgaaatatcttagcacaaaacttggcatagttattggatttaaggatgttggtatgtaaacagaatttagatatctctctgatatttttctttcttttttttttttttttttttttgtagagacatggtttcactatgttgtctgggcttgtctccaactcctaggttcaagtgatccttccacctcagcctcctaaattgctgggattacagacatgagccaccatgccctgtcaatgtttggtatttttcaaaggcaaaatctagagtcagctttaatcttttctctcagttatgtcattgtcctttggaaagtggagttataatacaaaacaaagggacagcgatttctcaccccttcatatttgtgtgtattttgttctaccctgacatgacagtctagggaaattaatactgttacgctgtttgtctttcacatgatcgtaggtatgctttccagcacacataccaagcaacatctgtgttacctttccctaaattacaatttcatattattaaggttgttagatgtgttgcaataaccacaattggaaaagcaacctgactgtgattgatttttgttctttctttactatatagggctggctttgacttcaaagagttatcttagttcggaaaagaggccagagcaggaacctgtgaaatgattcatgggagaagatggaagtaaatgatgagttcatgtgcctctagtctccagtaatggcataaatccatagggaagttctttaatgtcagcgtgtatgcctgcctgtgtcaagtcacatataggctagcacatattatgaattaagaaatctggggaatgaacaaaaattcctttatacagttgttcattttcaaaagatgtcatatagacttgaagatacaggaggaaaatattgctctcatttaaccataaaaactgtatttgcatttttataaacacaaagaccattcacatatggctaagcacctttttggaacaagagaaaacatggttaattgattgtgggctaaggcctatctgtgacttctcaagtccacaaacgagtttattcccagactgaaaattttaaggcctgctgattctttaaaataatgaggaaggcaatgaatatatagcatgcttactactatgtcatttaaatcattggattttataacagccctcctctccctgggagaataaaacttagcatgtatatgtgctgtttcctttgcattatacgatacaagttgaagaatactctcttagggagttaatatcacaaattgaaaaacacttccttctttccttcgccattcttaacagaagtcacctaggagcaccaaacatgctaacgtattcagctaggcactgccaaaccattaagccggccacagacagaggaaagaaaatcatcaattaagagacaagaactaactgtaacacactgaaaataagatagctcaagaacacaggaattcctctttgataagtgatggagaagtcgcactctaacaacaggtctcattgtcagaaacaccgttatcagatgcagaagtacagagatctggacaaggtgtaccttcctttccttgttccactggtgctctcttgagccctccactctctgcccccaaaatgtccagaatgctacaggttacctataacccctctgaaattgctgtgttttctgatgggaaccctaagagtactgcccttcaacaggaaactgggtggcgatccacctacatgataagtcgtcaccaattcctgttccttatctgctgaagctaatgtaatgctaaggaaatccgaatttctaaaacatctgtctcatcaactccttttttttttttgagatggagcatcgctctgtcgcccaggctggagtgcaatggcacaatctcggctcactgcaacctctgcctcccgggttcaagcaattcttctgccacagcctcccgagtagcttggattacaggcacccaccaccatacccagctaattttttttttttttttagagacagggtttcaccatgttggccaggctggtcttgaactcctgacctcaggtgatctgcccgcctcagccttccaaaatgctgagattacaggcgtgagccactgcacctggcctcatcaactccttctattagaaagaaggttttgatacctctttgagcacttgttttaaaagtgtgctatgtttggcatctagggatggtcatttgtattatgtttagtatatctgtcttcagagagaattatttatataatggagaatggtaggaagaaacaaatctcaaatttgtgtggcaagctattcaatataaatcaacttggggcggggaggaattctatacaaaaggaataaaggcagctcttacctaaaagaaaataaaaacttttttaggaaaacaaacaagcaaacaaacaaaaaacgcaaggccaggtgtcgtggctcatgcctgcaatcccagcactttgggaggctgaggtgggtggatcacttgaggtcaggagttcgagaccagcctggccaatgtggtgaaaccccatctctactaaaaatataaaattagctgggtgtggtggtgcccgcctgtagtcctagctactcaggaggcaggagaattgcttgaaccctggcggcagaggttgcagtgagccaagattgcaacattgcactccagcctcggcaacagagtgagactccatcttaaaaaagaaaaaaaaaaaaaaagcagaatacattgtaatggctgctgagaagcagctgtctttgtgtgtttctctttgtgtggtacctttcatttaggataggtttcaaacccacagtcctattgctgtgagtttggtctctggaattggcaggtgtaggtaggaatcccttatctgtgtggtcctatgttaatctctgcaagcttcaattttctcatagttgaaacataattaacaataagatatcagatactttgtaaaattattgtaaggattaagtcgggtgaaggttcctaggattattcagcacatattgcaaacatttttttgtgaggattaagtatgataagccgtgtgagggttgtagacgcatcctgcccaggtcttcagtgcacattaacattccttctctcttccccttcttaatgatcatttcttgtctccttcagggaaagcacaggttgcatgtagacactggaatggagggtgattggtgtggccttattcctgttggacagccttgtatgcaggttacaaccacaggcctcaagtggaacctcagtaagtagaaccttttcataaaggaatgatttttttttttctttttttctctgtttctttctttcttgctttctttctttttttttaatgtctctgtggtctatacctaggaggaattgctgggtcatatgataactctatgtttaacctattgaggaactgccagattaccttccagtgtacctgaaccattttacatttctatgtgcagtgtaagagtgttccagtttccccacattctcaacacttgttattatctgttttctggcttatagttatcctagagcatgtgaaggtggcatcttatgggggtttgatttgcatttctctgatgactaattatgtcgagcatcttttcttgtacttatggaacattcatatatcttcattggagaaatgtctattcagctcttttacccatattttaattggctatttttacattgagttgtaagagtcctttatgtattttagatacaagtcctttacccaggtgtgtgacttgcaaaaattttttagcccttagcatatattttcattttctgaaatttaattaactaaattaacaaatgttaattaagtctatgttttttcttttatggatcatatttttgatgtcataccaaagaactctttgccccaccgtcttcacgattttgtatatttgaaaaacctactttactttgctagagaagcagcaaattattttcgtagtcaaatctttaacataagatttgctgctcttattaaattttaaaatgttttccagtaattgtgaactgtattaggtcctactagtactaaaactatctgagttaaaaatattaaaaagtaagggggtcctgttcatgagataaatgctgattccaaaaggaaccatcagtcgttgtgaaatgaatcaactctagcctttctaaggatagtaataatttaatcaaagagttgtgattgaatgtcaaagggatcatctcctaattgaccaatacggcaaagctgtacaagtaaaatatggaactgtatcgttcttttctaacaagtaaagcacttagattcccacaagaaaataaatttttttccaagaaataaatattttgaaacaaaaagacctgtaaaaagacctttctatgagccactgcagaaacaattaggaaaaactagagatattttgaaacaaatgtttagagagctcatcagaatttgaaaggactgtgagaacacatctcctccagtgcacagaaatatgtgacaggctttgaagctgtttagctgaaattgacctgagctcccattggaagcttttttgaaaacattctggccccaaacaactgttttattttttctagttctcattatttccaagggcacccaatctagacagtgatgaacttcctgctggatctaggagcgatcacacttttcagggctggcagcaagacaaaggagcactgagcaaagaggaccgttggcactaggagcaggtgccccagcttcctttatcttatagtaataaaaaagagtcatatgttagacatgattcttctgttatctttagaatgtcctttgatcctatacttcccacagtagtatgcacattgtattagtccatgctcacattgctgtaaagaactacctgagactgggtaatttatgaagaaaagaggtttaactgactcacagttatgcaggcttaccaggaagcatgaccaggaggcctcaggaaacttacagtcatggtgggaggtgaaagggaagcaggcaccttcttcacatggcagcaagagagaatgagagcgatgggggacgtgccacagacttttaaaccatcaaatctcatgagaagtcagtcactaccacgagaacagcaagggggaagcccactcccatgattccgtcacctcccaccaggttcctccaccaacaattgggaattacatacaattcaacatgcaatttgggtggggacctggagtcaaatcgtatcacacatcctaattctgtgtaaggctttctctggtaagggggccttcagcatgatgagggcagggctcttaaccttcctgagataacttttgatccggcctgcatgtaatatgccattacttatttatatagttacacatcactttgacttttgaagtaattattttttctaaacttcataaaaataaaaaaaaaacttcatggcatatgcaaagcaataaagttgaaatacaaagtgtttcatcaattacctgttgtaaaagcgctaattcatggggtcttctgataggtaatattgcctcattaaaagttaataaaaataaatgtgacatcatgttgacttgaagaaaagtgggtagatttcattcacagagagggtccctgccttcctcagtgctgttgtctgtgaaagagccctgaggtcagggttattttgtcagtcatggctacaaagggacagggtgaaggtgggcttgcagaaagagaaagaatatgcagacacttagtcaggggcagctcacttcttgggttaatgggagtaagcaagtttttgtgaagaaacttgtcaaggtcctcatgtgcggccccgtggcttgatctctacctatctccacccactctaagtacatgatgccacaagttctaaaagtagttggatttatctgttaccagttcgcaatatttcacatgccattctaacgtttaaaaaaaaaaaattgtgtgactgatacctaggtaccgatcacccaggagtgaaacgtttcaaatattactgaagctgcctatgtttacagtcttttatttcatagcaatatgctatgaatattctttgacttgtgtcttgtacaagagtttctctaggatatatacagttggcagtaaaatagctgtgtcatagataatcacatcttcacctttgtgagatacaccatattgctctacacagtgattgtacccatgtgtattcagcccaggaatacatattaagttcccctgctccatatcgtcaacaattcttgctattaccaaacttaatcatttttgtcagcctgatgagtgtaaatgatatgtttttgtggtctctgctgataaggataagcatctttttgtagttattattcatgctggtttcttcttctgtgaattgctactttcttttgcctatttttccattgggatgttaattcttagaagttctgaagcctctttttcctggccgtactttggcttttcaatttgtttatggtgtttttatatgaacagagtttattgagttaaatgcagtcaaaatttatcagtttagtcattttcgtgtaagttatctttctattccccatggtcataaagatactctcatttaagtttcgtgtttaggtcttttctttcacctgaagttgatttttgtatatgatgtaaggatctagttttttaaagataatgaattgccctaacatcatttattaatcctttctccagtgatttgcagtgtagcacaggtgttcatatgtatgggtatgtttcttggatctgttttgttccattggcttacatacctgttcctgtgctggagccacgctgccttcattaccatagctttataataaatattgaaatgtgctaagttgagtcctcagaccttgttcttcaaaattgtcactctattcctggcattttgctcatttgtttgttcgagacggagtgtctcactgtcgcctgggctggagtgcaatggtgcaatttcggctcactgcaacctccgcctcctgggttcaagtgattctcctgcctcggcctcctgagtaactgggattacagacgactgccaccacacccagctaatttttgttttgttttgttttgtttgcattcttagtagagacagggtttcaccaggttggccaggcttgtctccaactcctgactttgtgattcacccacctcggcctcccaaagtgctgggattacaggcatgagtcaccacaccggcctgctcttctttataaattttagaagtaacttgacaagtgcctctctcacacaattctattataatttttgctgcaattacatttaatgtctagattaatttgggaagactcaaaaaattggggaaggaaatttctacatgaaattgagtcttcccatccacaaatttagtttagctttctatttacttagaacttttaaattcctttcaataattttataactttctctataaacatcctatgcatttttataaggtttatttctataaaccctatattttgtgtcctagtataaattatactttaaaaaattacattttctgttggtgatatatagacatataattcatttttgtctattttaatgttaacatattgatgaacattaattatatctgaaaacgtgactgtacactcacttggttttctatacacaatcgtatttctgttaataatcaagttttcttctgcagtctgtaacaaatagaattaagttactataatggactgaaatggtggctttaaaaaaaaagcctttttgttggtttcctcatgtagcaaagtgcagaggtaagtacctacagggcaaggtttctattatttcctcagcctttgcctgaaaatctaagatgtcttttgcaactccagctgtattgtgcccagtaggcatcagaagagaggaaagggaagggagcaggaaggatctgtaacgggaatcagagacatcagggattcccggcattctcagaaacccttcctgtgtctcatcttttgcctcagtggccagaattgtatcacatagccaccctagcttcaaggaaggctacgtgtgcaattttgaatccaactacattgtcactccaaataaaactgaggttccatcagtagggaagaagagaatgactaggagtctgctcttctgtcaaaaaatgcctttgcttcattcatcatcttgaacattttatctatgtatatcttaaaaaatttattttagttttctttcagccatattcatatggattgctgttgtttctgttgaaaaaatctacaatcaatgaaattagttctgatttgtttataatctgtcacgttttctagaccttaagttttgctttgatattctaaagttttacaacaatatgtttgcatgtaacgtttcttttgttctagttgctttttattcattctgataattggtatagttcatcaattctgaaaattcttagccgtttatcttcttcgattgcttcccctccatttttttctattcttttctccttgaactgttagtaaacatattaggcctcatcatcccttttccttgtttattctttgtgcattctatgtttgtttgtttgtttgttttcatctttcttttcactgtttctgtctttggctgtttctaatctgccatttaatgattgtgttttgaatttcatagattttatttttcactcttttttatctcaaaaaatttaagatcacgtcttgtttgttgccagtattttaattatatatttacttttttaaatatgtaagcagatttttaaaatatcagaaattgagatgaattatttaatctattagattgttaaaaatcataatttaattgataggagtttttttagatatttaaaaattggggcctattataatacatggtatcttatatttggtggaatacaatatggtatttgagcattctagtttcttcatctcttttttgacctaattctgctattttccttttttttattttttgagaaggagtctcaaattttctgtttccaattacttttaatgtttcttttaggttcagaggtacatgtgcaggtttgctatataggtatattgcatgtcacaggggttttatatacagattattttagcacccaggtaataagcatagtatccaataggtaatttttcagtccttaccctgcaccctcaactagacattggcatctgttgttcccttctttgtgtctatgtgaactcaacatttcacttccacttataagtgagaacatgtagtatttggttttctgtttttgtgttagttcacttaggataatggccaccagctccatctatgttgctgcaaacgcatgatcttgttctttttatggctgtgtgatattccatggtgtatatgtaccacattttatttatccagtctaccgttgatgaggatttcagttgattcggtgtctttgctattgtggctagtgctgtgatggacatacatgtacatgttctttatggtagaatgatttctatttctttggatatatacccaataatgggattgctgggtcaaatggtaattctgctttgagttctttgaaaaatcgctaaactgctctccaccatggctgaactaatttccattcccaccagcagtatatgtgttccttttctcttcagcctcaccagcatctattaattttttgcctttttgataatactgctatttttaaatatttcttttattctcactcatgatagacactttatcctgtgttttatatatgtggttgtctttttttttcctgtggaaatatgtagaaggttaggttgagcatgttctttgacatgagattttaaggtgcttctgccagtgccctgaggtataaccaatcctggaatacttagctaccttggtataagattttcctgaagacgctttcagtgttaattaaaaccacaaggaattgaggtgtcttttttagtttttgcctctgtgaaagcccaggctgatagagagatgtttccttgttccgaaccttttctggcagaccagttatttcctagttgctatggtctgaaggtttatgcctccactcccaatttgtatgttgaaacttaatcatcaatgtgatattatcaggaggaggagacattgggaggtgagtagatcatgaaccctcgtgaatgggattaatgcccttataaaagaggcctgagagagacacttgcctcttccaccactcagtaagaaggtaccatctataaaccaggcaatggatctggagttccagatgccaaatccgtggtaccttgatcttgcagttctccacctccagaactgtgagcaataaatttgtgatgtttgtaagctatctagtttatggtattttattagagtaacccaaacagactaagacacaagtctacccttctgttaaagacgtagcagtgaatttatatagaacctcagtcctaactctactttatcgaggcccaacatgttgactcttgattgacatgtatctgaaaagaaaggcatcttagttaaggaaagaagcgaacattctctgtgcaggtgccctgttttccagctccttcaattttataccactgaagagtttattttcttgtgagcttagcatgttagttacagaacatttataataagttatgtattatgtctaagagtctggtatcaggagaatttcaggatatatgggctaccatatggccagaatggaaatcttccacatctcctagttgaggttgcttgagtaggacaagagtagcatcagggaaccctctgaaggggaaaagttaacagcaaaggctctggcaaggtttttcagaggccacaattatattttgaagtgactctattcaaactttaactcatggaaacatacaaatcattattgtaaacattccaacactcatattttcacctttgggaaatctgaattccagtcttacactgatttttgaagttctaaatggagccactgctcatcctaatcattaaccctagaattctgccccttcttgtatatttttcagaacccagcacactggcttctgcctcatgatagcttcatcctccccattccccttgtctccctactcagccatgttccatactctacatattcccagaacaaagattctcttcaataatttactaaaactactccagtctttcagtctcctgccaggagatagctacttaatctgatttataaatttgtgttaatgggtgttaatagctcaaagttgggtttccttcctagataatcctggtgaatttagcagggtgtatttaggttgatattccatgtaatacctatacagtcaagtggcagtatactctatgtatgggtttgaggtatttccagaagtttttgacttttcacaaaggatgggaacaataatcagaattgtaatattaatgttcatatgatatttcacatttttaaagagtcttttaaatattacaataggtctgtgtgacaggttggattgtctgtatttttcagatatggaaatagtaattaaaatctctaattgtcctaaatttacataattatggattaatgcactcaaaatttgaaatcaagtcttcaatactatttatctttctttccaattagtaagtgaaggacttatataaaataagttgatgtttaaaaaatttaaatttggaataaagagaatgtaaatttgggataaagagaagataggaggaaggtaactacatgggaaagcaaaggtgatatgaaagagaagataatggcacagaatggaaagtaatggcaagaaaagtgaaattctgacggacagaacttttaacttttctacacttttgcctaaggaaaatattaaatggagttgccttccatttgcccaggcccctttatatagcactcatattgagattgaaattatgtattcattgttctttcttttacgtttctttcaaagaaatatagaagtaaattacaaggaaataacttctcagcattgactaaaagagactcaactcttttaacctaggggaaagagttttgaaagagagaaattatgagaaaacagtttgaaaagatttttcatctctatgaaaataaaaaagctgtaataagcatatacaggtaccatggttttctgcaggagttttctattaaaatttttaagtgtcagcctaacaagggaacagttcatgcatctgtaaaattacacttgctaataatgcattttcagtgagaaatgctcttaattctcactccactgcaactcacaaagtgattgtaggcagttgtcatagtatagctatagctattcccacttaggttataacctcttgtgagctagtgccactaatgtgtgagatgttttgtgtttttagatgtctttgttattatattaattattgattttgcagaccagtgcttaaaaaagacactctgaaactgtgacatcagtatttcttgtctgagtcaaggacgatgtctttcatactgtaagtcttctataatcaataacttactctgaattgaattaaatatgttaaaacatttttccagaaaaaaaaaagatgcattacagatcaaaggtgacaataaaattggcattggcaatcttttcccctctggtccttcctaaaatagatgctagctgaggtcttccacccccaaacccttttctcgagttaacgagttggtgaaatgattgcattttatcacatttacgatgccattgattgtaagatgtgtattattttatgtatactaagaaaaaatatactgattataattgcagatataggaaaatatccatgttagaactgatgaaatttgatagatcaaatcgaatagaaaattaagttccttatagcctctgtatattagacctttgtcagatgcatagtttgcaaatattttctccctttctgtaggttatttactctcttgacagtttcttttgctctgcagaagctctttagtttaattaggtcccatttatcaatttttggtttttttgcaattccttttagtgtcttcgtcatgaaatctttgctggattctgtgtccagaatggtatttcttaggttatccccaggatttttatagttttaggttttacatttaagtctatactccatcttgagttgatgtttgcatgtagtgtaaggaaggggtccagtttcaatcttctacatatggctagccagctaccccagcaccatttattaaatagggagtcttttccccattgcttgtttttgtcagctttgctgaagatcagatgattattggtgtgtggtattacttctgggctctctgttctgttcctttggtctatgtgtctgtttttgtaccagtaccatgctgttttggttactgtacccttgtagcatagcttcaagtcaggcgatgtctccagctttgttcattttgcttaagaatgccttggctattcaggctatttgtttggttccataagaactttaaaatagtgttttctaattctgtgaagaatatcattggtagtccaataggaatagcattgaatctctaaattgcttaggacagtatggccattttaacaatattgattcttcctatttatgagcatgcaatctttttccatttgtttctgtcatctctgatttctttgagcaatgttttgcaattgtcattgtagagatctttttattttttattttattattattgtactttaagttttagggtacatgtgcacaatgtgcaggttagttacatatgtatacatgtgccatgctggtgtgctgcacccattaactcgtcatttagcattaggtatatctcctaaagctatccctccccccaccccacaacagtccccagagtgtgatgttccccttcctgtgtccatgtgttctcattgctcaattcccacctgtgagtgagaatatgcggtgtttggttttttgttcttgagatggtttactgagaatgatgatttccaatttcatccatgtccctacaagggacatgaactcatcattttttatggctgcatagtattccatggtgtatatgtgccacattttcttaatccagtctatcattgttggacatttggattggttccaagtctttgctatcgtgaatagtgccgcaataaacatacgtgtgcatgtgtctttatagtagcatgatttatagtcctttgggtatatactcagtaatgggatggctgggtcaaatggtatttctagttctagatccctgaggaatcgccacactgacttccacaatggttgaactagtttacagtcccaccaacagtgtaaaagtgttcctatttctccacatcctctccagcacccgttgtctcctgactttttaatgatcaccattctaactggtgtgagatggtatctcattgtggttttgatttgcatttctctgatagccagtgatggtgagcattttttcatgtgttttttggctgcataaatgtcttcttttgagaagtgtctgttcatgtcctttgcccactttttgatggggttgtttgtttttttcttgtaaatttgtttgagttcattgtagattctggatattagccctttgtcagattagaaggttgggaaaattttctcccattgtgtaggttgcctgttcactctgatggtagtttcttttgctgtgcagaagctctttagtttaattagatcccatttgtcaattttggcttttgttgccattgcttttagtgttttagacatgaagtccttgtccatgcctatgtcctgagtggtaatgcctaggttttcttctaggatttttatggttttaggtctaacgtttaagtctttaatccatctcaaattaatttttgtataaggtgtaaggaagggatccagtttcagctttctacatatggctagccagttttcccagcaccatttattaaatagggaatcctttccccattgcttgtttttctcaggtttgtcaaagatcagatggttgtagatatgcagcgttatttctgagggctctgttctgttccattgatctatatctctgttttggtaccagtaccatgctgttttggttactgtagccttgtagtatagtttgaagtcaggtagtgtgatgcctccagctttgttcttttggcttaggattgacttggcgatgtgggctcttttttggttccatatgaactttaaagtagttttttccaattctgtgaagaaagtcatttgtagcttgatggggatggcattggatctataaattaccttgggcagtatggccattttcacgatattgattcttcctacccatgagcatggaatgttcttccatttctttgtatcctcttttatttccttgagcagtggtttgtagttctccttgaagaggtccttcacgtcccttgtaagttggattcctaggtattttattctctttgaagcaattgtgaatggttagctgtattccaagcaaaaaacaaacaaccttgttaaaaagtagacaaaggacatgaactgacacttttcgagagaagatatacatgtggccaacaagcatattaaaaaaatgctgaacaccactaatcattagagaaatgcaaatcaaaaccacagtgagataccatctcacaccagttggaatgactattattaaaaggtcaaaaaataaaagatgctggcagggtcacagaaaaaagggaatgctttatactctgctgaggaagtgtaaattagttcagccattgtggaaagcagtgtggaaattcctcagagaatttaaaacagaattactatttgacccagtaatcttatttttgaataaatacccaaaataatataaatgtttctgtcataaagacacatgcatatgttcattgcagcactattcacaatagcaaagacatggaatcaacctaaatgcccatcaacagtagattggataaagaaaatgtgataaatatacaccatggaatactatgcagccataaaaaagaacaagatcatgtcttttgtgggaacatgatggatggagctggagactattatccttagcaaactaacacagggactgaaaaccaaataccacatattctcacttataagtgggagctaaatgatgagaacttatgaacacaaagaaggaaacaatagacactgatgtctacttgaagggggagggtgggaagtgggagaggagcagaaaagataactattgtgtacttggcttagtacttgagtaatgaaataatatgcaaaagaaacccctatgacatgtgtttatttatataaccttcattatgtacccctaaacctaaaagaaaagtttgttttttttttttaaaaaaaaagaaaagaaaatgtgatacatataaaccatggagcactatgcagccattaagaagaatgagatcatgtcctttgcattaacatggatggagctggaggtcattatccaaagcaaactaatgtaggaacagaaaaccaaataacgcacgaagtattctcacttataagtgggagctaaacaatgagaatacatgaacacaaagagtggaacagtagacactggggcccacttgagggtgggattagggagaggatcagaaaaaatacctatcaggggccatgcttattacccaggtgataaaataatctgtataccaaaccttcataaaatgcagtttacctatacaacaaacctgaccatgtacccctgaacctaaaataaaagtgaacagtgaaaaatacgaaacagaaagattcctgaatgtcttctgatggattgttaggcctggtctctaaaagatcctttcagggttatctgattctataggaaacttaagcccttcattgtttttgattattttacaactctgtttagttagaagctaacttgtaaggggctgattgtaatgtaaatgattactgtttgtataagtcaaatgagcttttgttctgttaaaatgcagtggattctcaccctatagaattggccagtttcctattcattagcaaactcatgtcagcattcccaattatctgtagatgtgtctgtcctttgtagagtctccttgaagcagtttttttttttatttacaggttttctcattaattaatgacttaaataaaatatctgtcatgttcattttatatttgtatgagccattattttaccttttaaaaactatttgttaacaaaccaaattgcagtcactcatgatattttaaggatcacaagctgttgcggtctttttaaaaaagtgtattttgttattgcaaaataccatttaacttccaagtagaggtcaggggtagccctggaaacaaagggctggttatgtcacttccgtatttgtgtactgggaagaggtctcacaaagagctatgctatgctatctttgtctaaaaaggatcatggccatgactttgagccaaggtaagcaagaggaatcagaccggtatgatcttctaggaggcaagcattgattctagttctagtagactaagctagaacgaaatgatatgttttttttaaacattttttgagatataattcacatatcatacaattcactcattgaacatgtatagtcaatagtatttagtaggccgggcgcggtggctcacgcctgtaatcccagcactttgggaggccgaggcgggcagatcacgaggtcaggagatcgagaccaccctggctaacccagtgaaaccccgtctctactaaaaatacaaaaaattagccgggcatggtggcgggcgcctgtagtcccagctactcgggaggctggggcaggagaatggcctgaacccgggaggcagagcttgcagtgagccgagatcatgccactgcactccagcctgggcgacagagcaagactctgtctcaaaaaaaaaaaaaaaaaaaaattggatttagtgtattaaaatatgtgtacagtcatcaccagacaaatttagaaagttcatcttttcaaaaagaaaccatgtatcctttagctgtcaccctcacatcccccccatgcctttttgctctagccctaagcaactacttctctatttcctatctctagatattctagtctttcatatgaattgaatcatgtaatatagggatttttgtgactgacttctttcacttagcataacattttaaggttcatcaatgtagaaatttgtcagtatttcattcacttacatggctgcataatattccaccatatggttataccacattttatctatttgtcaattaatgggcatttgaattgtttccaccttttgcctattgcaagtaatgctgctatagatactcatgtacaaatttctgtgtagacatgtcttcatttttgaggggtatatacctaggagtagagtttctgggcattattgtatctttaattgctgaagaacttccagactgttttccaaagggactacaccattttctattcctgccaacagtgtatgagagttccaattttgccatgtccttgccaacacttattatttttatctcactttttgattctagccaatctggcatgtgtgaagtgatatctcattgtggttttgatttgcatttccctgatgaataatgatgtggaatgtattttcaagtacttcttggccatttgtatacctttcatgcagattctttagccatttcttaattgagctatttgtcttttaatcattgagttgttagagttctttatgtattccagatacaagtcccttatcagatatatgatctgaaaatattttcttccattttgtgggctctttttgctttcttaatggtgttctttaaagcaaaaagaaaaactactgttgacaaagtcttatttttttcacttgttacttatgctttttgcatcatatctaagaattggttgtcaaatccaatgtcatgaaaacttacattttcttttaagaatgtacagttttgtgcttacatttaggttctggatctgtgttgaattaatttttatatttaagtaattttgtgtaagttatagctaggattctaatagagattgtgttgattctgtagagtattttggagagtataaccatcttaacaatgttgtcttctaatccatgaacatggaatgcttttcatttatttagatctcatttaatttcttttcatgttctttttaaatagtacaagttgtatacttcttttgttacattatttagtattgtttttatgctgtagtgaatggaattcattttattttgggtttaattccaagtgtatagaaatacaattgatttctgcaatttatcttgtatcctgcaaccttgctgaacttattccttaagactaatggatttttagcagatttcttaggagtttctatatacaagatcatgatttctgcaaatagaagtacttttacttcttttcaaatctggatgcattttcttcctttttcttgccaaattgtcctcgctagaacctcaggtacaatattgaataaaagtgttgagagtgtacatctttgttatgttcctgatcttaggaagaaagcatctagttttctgttcttaagaatgatgttaactgtgggcttttcatagatgtcctttattagattaagggggttctttgctatttccagttgttgagtggttatatcatgaaagtgtgttggattttgtatctttctgcatctgttgaaatgaacatttgattttaaaacttctattgatatgttttacattaattgaatttcagatattaaatcaaacttgcatccctggaataaatcccacttggtcataatgtatcattactgttatatgttgctggatttggtttctgactatgttgttgaggatgtttgcatccatattcctaacaggtattgttctgtggctttctcttcatgtgatgtctttgtctggttttagtatcaggataatactgagatttgctcttcaagttgaggtattcaagagagaaactggggaagtcagcaaggcagcaggaacaacccaattaaagtagagttggcaggcaagatacagaatgtggggtacgtgacatagagggaattttacagtgtagaaaattttttatgtttgacagtatatttgaagatagataaatagatagagagataacagacagacttagaatgggtgttgtttgatgataggtagatgaaaaaaattgacaatatttgttaaaattttcatgatgtaagttttcagatttatcagttccctattgctgctgtaacaaattaccacaaacttagtggcctaaaacaacacaaagtcatgattttacagtttggaggacagtcaaaaatgagtctcatgagactaaaatacaagcattggcagagcttcattcctcctgcaagctgcaagagggaagttttttctaaccctttccagcttctaaaggccacccacacttcttggctcctaaccctttcctccatcctcaagactggcagcatagcagcttcaaatctctctccctctttttctgacctctctttctggtgtcacttttttttttttttctgactctgagtcttctgccttcttcttttaaggaacttgtgactacactaggaccacctggatagccaaggataatcccgtcccaagactaatcagattaatcagacttaatcacatctgtaaagttcctcttgccatgtaagtagcatattggcaggttccggggattacaattgaggactttttagtggtccattattcagcctactatatcagatagtaatccagtgattttctaaaataatacttcttgaatacaattatatgccattgaatctgtacaattgaatcgatgtataaaaacggtatataattgtattctatttgaaaaacttagtgttgtcattcatcttgcctcaggtaacttgcagttaagaatcaagacataaacaaaacaaattttgcaagtaggatttatttgatgccctcaacagggaatgaggtctaccttttccattcaatgtagttactgttctccaaaattgtagtaagttttgccacgtgtgtattttgatgcttcagaaccaggaaggaagtcagcaggtttacttaggctagagctcactcttcactctgtggcaggttttatccagtctcttcttagacatatgtttcccagcctttttgcatgtcttttctgtttttagcctttttaagttgttcttatacgagagactgatactttataccaataacaggcagcaatctgatgtggaaataaaattcccgagactctaaaaacatgtggctgtaaaggcaacaagaaagagtcaaaactttctccctcctgtttttgttgcctttctggccgcatgttatcagagtctcaggactctaaaggtccttattatcaatgacttctctgagcacacatacaccattaaactgctggtggactacttacatggctatcactcttactcctcccccttccacacccgcatatacctacactctgatataatacaagtttaggttttttattacgtatgagatttggtcagttggggattatagaccacaaaactgccacctttgatgagttccgagtattagcattgaggaatgattgcaccagctggcaatcgtgggaagctctcggacctagcttttatgaagaaggcaaagtgtggggagggggttgattagcaggagatattatttgtctatagagaaaaatacacggaaaaacaagattactttttagattatgtcattctgaagactgtatagtattctacttgtaagcaaatactacatttttcaggcatataagactaatgacacacagccaactacaaactgggatttaataatatatttcattaactcagctccagttccattttctatgttgtaggatttgaaccagacacaaatgatttctcttaagtccttgcccttttgtgattctgctgagagcacaaggaacccacaataatttaccatatgccatagttcatcctgttttgttttttaaaaaactcgcaacaacctgacacatttgttgtggttgattctgggcatttaaatatgaaaacaatcaatgtgcatttgtagagaatatgacaagtgggaatttgtgtgcaggccaatttttcactgacctgcattcaagaacattattataacccaagcttgcctcccaagttgtttaaatgagttgatttcccagtatttgcgtgggcacgttgagtgatgagaatgacttcagtgtaagcccgactccctttctatttcccctcctctgggtttcagttttgtgctgattcagatgtgagctctgtgcattcaaccatccagttaatacactgagacaagaaagcaataacttttggtgattacatgagttgtagagaaagaatcaagggtgcaggtgaataaacttttgctctgggaatggcacactggatataattttctgctggttccaaataacaatactttaaatcttgaataagtctttcatgtatctcctacctgttgtatctctatactcattctcattctggtataatatcaaccttttttaaatgtgaagtattatcatccccattttatagatgagaaaacaagatgagacacaagatgccagatgaattgtctaagttcatattttctaacctagtcctctatatacataaaatggattcatcattagttatttacataaccatttttaaaatcgttggatgtggtagtagtgaaatagcctatttccaagtcatttttctaaatgacaatgaaatttttctgaaattgggccggctcaaagacaaacaagatagcaaacatcttagcagttaaaatcaggtttcaggcaccatccaagagattcctttccactccatgaaccacaagtgcacaagctagtagatttgtagtgtgtaatttaagtgtaacttaggcttactgtgatatctgatttctagggtaattataaattgttagcattcatcgtggttctccaagaatttgtggtaaggattcgagggaagaaaaaagatatatttagcatccacaaaggggaataaatggttaaaacagtgtttttgagtgtctaaagattaaagggtgaaaaagaacaatgttaatagagctaggaagacaaggctgcaggaggtttacactgcatgcagggctttttcagcagtgagccaccactttgtcctctagattgtttggagatcaaactgtaaaaaagctaaaaatatttggagaacactaggtttaaattaaaaggaggggagatcaaactggagaaatgcccattatggagaccaaaatagaagtatctgcatcagagaccttttacatatacccatgtatcccaaatagtagtgaagtatttgcatagctatatgcatatatagctatacttcaaggaaaatcaaggcataggttacatggagagcaggtaaattcccaagctaaaggggtgcgtcagggaattatacagtattttctttccattccagagaaaagagtaggattgaactagcaagagagggtaaagatcctctggctttgagaatattataagagccaaaaacaagaacaaatccatgcctttttaattttttttgttttttgacttctagctttagggttcatggcaggtttgctctctagataaattacatgttggggggtttgctatacatattattttgtcatccaggtagtaagtatggtacccgataggcagtttttcaatcctcaccctcctcccacccgcctcccacccgcctcccaccctctgccctcaagtaggcccgatgtctctggttcccttctttgtgtccgtgtgtactcagtgttagctcccactcaaatcagtgctttaaacatcttgacaaaaaaaaatctctggagattattgcataatatataacttaccttctctgtatgtaatttataccttgactgttccttaaaatgtagcagaaacaaagtatgtatctgtttacttcaattcataatgaggagggaagatgacaatagggttcaaagtctgactctgtaactaatgaattaaatggtactacaagtaacatggattcttcatatatacaaagaggactgattgtatatatgatgatagatggtatccaaggtttcttttggtttgaaaaccatggtcgctgaagccacagagaagcgcgtgagtccagatcctaaatgtcaggagcttgatattctaaggaggcatccctctcctccttacattcctgtgtggcagcaatgaacggtccccatgagaagctgtaataggatgagactcaggggacttttgcttggaagctgtgttgggatgacatcgcgttgtgcatacccgtctcttgtcggttttatgagatgtagttcactgtatgacagtggctttgaacattgtggaagaagacgtcctatggcatcactacagtttatcatctcctgctgaaggttctcactctttagaagttcacagccaagcgagtactgggaaattattattattcctcatttacactgagacagagttgaagctctggccgcagtcaataaatcactttgatgatgattcattagccgtgttgagatcccccggccgctccagcgccagcgtcacacttgggctgtcttctcatcttaattgcaaggtttcacttctggagaagcacagcagcctttgccactcacctattttctggacacatttaatttcaaattaacaagttttccctcgcaactatctatctctaaatccggtttttcgtgtgtgtgtgtgtgtgtgtgtgtgtgtcttaatgtgcttaggaaaaagggaaaaacgtgtttaggaaaaaagtgtgtgtgtgtgtgtcttcatgtgcttaggaaaaaagaatgctttcagactctcttttcttaaacaactacagatgataactaatttttatcttaacctttaagaaattagttatgtgcagtgtacaagtggaaagtctgccaggagagagaaacaaattgtggacaattgaaatctgacatacaattaagaaaaatgtaaattgaaacttgtggtgttttcactaacttgtatcccaccaaatgctgattttctagagataacagtgaagagatgccatttcctgctgccatggtacatgccaactaccatataaatttaataaatgaggctcattccctataggtgggtgcagtaccaaagggaggagaagtctggcttgtgcttgtaggacaaagtgaatgaggacagagctagctctggcagccttctcctcctcatcccctgctgctgcaatggtgatataaatatgcgctctgttctcccctatccttactatgtagctctctttctttaaaatgagtaactttgaactaaactatctcaaaatctttttcatctctagcattagtctttcttctttattctcagtaatagaattgtactattttatcctctcctcctgagagcctattaaaagcatttgaggtccaacacatattccattttccccataatacatgacctcaccccctggtattctcagaatgtgttctccctttaacgtctccccctgcacaaatgttactcatctacaagggccatttcagatcacatccttcatgaagcttttataactaaatgcaatttctctttcctttgaattcctaaagtataccatgtaactcttccatataaatagcatcattatttgtgtatatttcttattcccttgactagaatggatttgcctcaagaatttggtgcttgtcttctgtgtcccctcctagtcatccagaatagtacctttgcatattttatgtaattaaccacctttttaaaatcagcaagtgcattttacccacacgagttctgtaatgggacacggaactaattgtgctatggtaaaaaatgttcaagcaagagttctttattataacttttaaagcaattagaagaatgaaggataagttccattttaagggtaaaaatacttgcaaaccctgccagaagttgatatggtttaaagtaatacgatccaaaaatgtgcctattacaaaagagggtttttgagtctgagtgagtgtatgtgtgtgtgtctctgtgtgtgtccagacaggggcttacctagggagtggcagtggaggaatttttggaaattattgcctttcgggggatttggagttttaaatgcatcctctgctccctaggatgtttttttctgactcatttctttactgctctgagcgtgagtcaaggtctaaagcatttcatttagattcattctccttttagatgctgaaaattgtacagaactcttatttgagagcagacatcattgtaaaaacaaaggcaaatgaaattggttcttgcattattgtgtcctcattcatgaaacttgtaatatttgctttgcaaaaagaaagaaaacagaaaaatcttagttcaccttactctactgtttccaacaggcattcgtaatggtgttacacatatgtaaaaggtgggtttatgtttgttccagttattttgtatgttttatctacataactaggttgtatactcttttagtttataggcccttcatgttttgctcatcgtagttagtaaatccttaatattagatgcttaattggcattgattaataataggatttcttatcagggttgctgcttttaaatattcagatcttacacatttctctgtcattgttaactagaagaagtaactaaaggggttacttagccctgggaaactgtcatatttacagattagtaaaaaaaaaaaaaaaaaatagcagatcctatataaaaaacaaaaggcaaagagtgaacggtgagcaggccaggaagaagttagccaagaattaagctatcattgaaagagggattaataagttggatcttatgtaaaagagattaaaattgttggatttttactaaagaaatgcattggtcactcttaaaaatgcagaggagtaatagcatagtaggaacagaagccagatttctattcattaaggaggtattaaaaacatactgaaagcacaatggcaggaaattaaacttttaaaaagaagtttatcagtgatatgagaagatatatacatgtgaaggcttcattatcaagaaggcctttatgtccaagatgaaaggagtctacttatgttgaaagatcaaaaggaccaggaaactccagagatccagggagagatggaagaaacggggaaaggatgggtgaagtgtggaagtggtattcctcaagatggaagatggaattcagactggggatgggagcccttcgagaaaagtgtgtttagctccacctttgaaagtagagacaacgaaatgagagatgatgagttaggtatgaaggtgaagacactcagagatgacagaactgataggtggcaagagtctttaccaagacagagaccacagcatcggggataaggcactgggttaagggtaggatttagaaagtttaaaatacttatcaaggagagtgggttacattttgaaccacaacatggactaaactatgttgaacataaagtatttttcagttctgaatttccctctagcagaattgtagtaggaaatagtgggcagagtggactggaggccctgactgtgggcaagcctgcccttgggcagcggttctcaagtgccacaatatgtctcaatcacttgtcaattaggccccaagtactctgtaactaagtgtaagtactcatgattttgactgagtttttaaaaactcattaaagcagattaaaatttactcctaaaaatcatgcctctcactgtcaatttagtgtacttccttgaactgaaaagaaacctgtggagttagaatcagcgttatggaaattgtatgtgctttccccctcatctgaaggtgactcatggattcagctgctgttacagatttaccattaattgttatggcagtcacaaattatttagagcttcatggttcaagttttatagttagttgggttttctgtgtaatttttcggatgaattaatttttttctctgagacaaggtctcgctctctcacccaggctggagtgtggtagcacgattatggctcactgcaacatctgcctcctaggctcaagcaatcctcccacctcagctccccaagtaactggaactagaggcatgtgccactatgcccagataattttttgtagatatgtgatcttgctatgtggcccaagctggtctcaaagtcctagcttcaaacaatccacctgccttggtctcccaaagtattgggattacaggcatgagtcagtgccctggccaaaagaatgaatttttaataaagaaggtattgggcaaaaatacaaaaaattaggcatggtggtgtgcacctgtagttccagctactcgggaggctgaagtgggagggttgcctgagtccaggagttcgaggctgcagtgagccatgatcgtgcccctgcacaccagcctggacgacagagtgagactctatctctttaaaaagaaaacaagaacgtattggccgggcgtggtggttcacacctgtaatcccagcactttcggaggccgaggcaggtggatcatgaggtcgggagatcgagaccatcctggctaacacggtgaaaccccgtctctactaaaaataccaaaaattagccaggcatggtggcaggcccctgtagtcccagctactcgggaggctgaggcaggagaatggtgtgaatctgggagacggagcttgcagtgagcctagatcgagccactgcactccagcctgggcgacagagtgagactctgtctcgaaaaaaaaaatagaaaaagaaaattaaaaaaaaaaaaagaaaaagggtattgaatggaagaagaaaatgagagtagcgcatcaacaaatttcttgtacttgtatctaagcaatctaaaaatacaataggggatagaggggaggtcactttgccatgtcagtcagtattttcaaaaaaaagacaagtttttaaactagaagtcatcaaatatgttttgcgtacgccatttctcaataaaaaatgtccctttgcttggtctggtcctgggtccttttcttctttttatctgtaaattctccctaaatgatcttaccatgacccatggctttaaatacatctaaatgccattgtttctcaaatacatagttcccttcctgccctctctgattattccatttgtaccaagattcctgggatgtaagctaactagagcatagaaacttcatctgctttgttaacaacttatctctagtgccctcaagagcactgagttgttcagtaaatctttgttgaatgaatgcctaaaaaccttgtctaacccggtgaccataaacgacaacctgatttttgcctcacctgttcagttttccccatgtcagtaaaccaccatctacccaacagctcaaacccaaatccttaaactcattcttcccttttctccatctcctagtcccatcctagtctaggtgatctctaccatggaatcctgcagtggtctccttccttactgatcactttgtctaatcattctttgcaaaacaaccagagcaatctttttgaagccaaaataaaacttacttatgtcactccccagtttggcaccctctaatggctttccttcacatttagcataaaagccacactcttgcctgcatctcatgacctggtttgttctctcttccccagcctaggtgccagtttcccttcactcacttaactctagtctcagtgacctttcagtttctgccttaggcctttgtacctgcttttccttctgcctggaataccatttttcctgtctttcagtggatgtcccacattgtattttttgagtcttagcttagatgttacttctttaaggaggttgtttctaataaccagatctgcattagcatgaccaacccaccaacaaagcttctccagcacatcaccctgttttgttttctttattgcaatcatcactgtctgaaattattgaatgagattattgagtgtctttaaaagcagaagttgggtctcagtcagtcatttctatacctgccaaaacacaatcacatgccttagacacaaatggatcgttataaagtttggaaggacgacggagcgggctttaaatattggttctgctacttgctaggtatgtgaccttgtgtttcacctctctaagttatattttctcatctgtaaaacaaataatgatagagaaaataataactcttcataggaatgttgaaaggactaaatgagatagagcatgtccagtgcttggcacacagtgtaagtagtggatgttgttacggtgatgatttttatggatacccaaaatgtcaatcccaatagaatccaagagtagcccatcttaagtgactgagagtctaatattggtgacattctataatattgactgtcatagagccaataaataaatattgtaccaaaaacttagctgtgaatttaggcctatattcttaattaagaaaaaggtaacagtggaaaatcacttctgagtcttataaataggaaattggatttcctaatgggtaatttaaaatactttgggagcataaatacacctggagcactcaagctataagttggtgactcagaaaacaagggcacagaatcttgaaataagcaacagcaaatgagcacttaagcacttaaagagcaaattgcagaaaataaattaattcatttaaatatgcatgaatctcctgagtggggaatatgctgaaatggtgctgaatgatttcttttgttacgtgtgttcagaagtattaataatgcctcactttgtgctttatacctttgaggagaacaaatcccacaatcttttgcctttataaattgtttttaaagtaatggattctaaaacaggaaattctaatcaaagtatacactggtcacattgatttggaaaagtagataggaagtttatcagaagatagatggatccctgagagaatgaaaagtagttctgattacatcatttaaaaaaaaaaagtgggggtggcctttggggaggctgatataattttgcagaaacttcttaaaagttagaaacttgctgaccttttgcctaaaatacatgctaacatttaaccaacctctcggatactgtgtggcacagcaatgtaagttctaagaatcaatatactcaattgtagaccatagtgtatgttcaggatatttatcagaattactaactcagttatttcagctctcatcagatctcttaattttcattctggccagcacagacactaaaaatcttggtattttatgtccttgcatacttaaaaaccaactttatgcttacataattgaagaaataaagaaaaaggaccaggggaggaggcagacataatagaagcagaaacaaactctcaataaaaggactataagatgcaaagctatgctctctttgatctttttaaggagaaggatttaaggaaattccgatttgccctgcacatgctgatggctagggagcttccttccttggccacatttcgtctttgatgccaaggcagtgaaggggagcttggcagcagagcaagagctggaaccgaagagacctcaactgtggagtagatggagctgagaaaaggatttggcagccctgcctgagaacagaaataatcaaaagaattgccaagaaccataaaacaaaaagggtagggatatgagctacactgacttggttttctgaacatggaaaaatactaaatctattcgcagtctgttattatgctcatgtatttctatgagtttgttattacagtaatttctattttgccttaggtctatgaataggatcaagacagataagttttgttgttgtttgttaagtctggaaaaacacatgcttgctcacacaggatttaaatatgtgtaacttatgtataaatgcatatatccccatagttgaatatttccattgatgccaaaagttcattatttttttcttttgggatgcagtgatatgtcacaattaaataatcttagaaatcttttggagcactgtagaaagaaacaggagcacgttctgggaacgtggtgcagcatttgcagagtatgtcctgatgggtaagggatatgtacatcactggcatagcaagtagaggtggtggaaaggtgagaggcatgctagaagtattggcgggatcagctcatgtaggaccctgcataccgtaacacgatgtttggatttactctttaggtaatggggaaagattttaagccggggtgtggggaaatgctcacctttgcgtttaacaaagatgcctctggaatcaggtacaagttgtattacagaaagatacagtaaatagattttttgttcctttttaaaatcagaccatatagtaaactagaaccttatctcagttacctgaataaacactcaaaaaaagcatttcttactcattctaaaaagaaaaatctattgagcacaatttttaaaacttttggctacattaaatgtattatcatctttttcaatatgtatcatttacctttgaaattccaaattcaccttctgtgtctgcttacatggaagggagtataaggatgttctgtcttcagggttatgatttgtggaattacttggttgttcccaacaaacaaaattgcaaacgtctcttctccttgtgggatgtggtaagacttcatttctgtaatatattctgtgctgttgttctgaccaaacctgatgacccaacgatcttttgtttaaggtgaagtgatgtattttaaagtccagatgtaccacaaatgaagttctttagacattagaaaaatgtcacaattacatactcaccaactactcacccacctgactgcattttacactgcctgttactgttgctagaaggattatgcttacaggtagaattcacagagcacctacgtgaaatgagttagtatgtacttatgtaggtactaactgttcaatgatgcttctttaagaagatatatcctgtaataaactgaaaagcaggatcttcaagaactttcagtatgaaatattttccatccactgttatgcttctagtgattaacttgccttattaatagctctgtgagatgtttttctaatcagtgcacacgagctgtcatcaaaactagaattcctaattctgagccaaaacagttggagaccaaccaaatcaggacctttaataaggcttataaggaaaaaccatcaatcattcattccctctccctggctttgcatacattattgaaaaattttatcaaagtttttatactaaaaagccttttatgacatttgaatgttatacatattagcatgtagtattatctaatcaaaatttgatttgcaagggtgaatcagctaatgtattcataattttaatcctgttaacaactctgaaattggctgataattaccttaggattagagactctaatttgtacattggtaatgtgtttccagtcaccagctaatgtaataacaataataaattatacttctatcttcattgagagtgtgatggacagctgaattaggatatttccactggaactgaatatcaaacttttcccctaaatattaaagccttgtaaagtttctgaacattcaaggccacgtttagcgctgtgctagtcaaggcttatcatgttcccagtggttttaattcagttaaaatctgtgccttagtcttatcagcatcactatcactgtcagcagagtttcctcagtgcagtgccaaacaaaactgcctcataaaccacatgaaagccaaaaacttggccatgtagctttacctgcatttatagcaggcatccatctaattcacattgtcagagaggcctcatgtagaaaattccgttgccccaaaatatttctaatgatgtgttttaaatctatgcaataagagtaaattaatgatgttaagccaaaggattttaaactccttcttaaactgcagaaggctttgcttaccaaactttacttagaatcttaaagcataaagatagataagcaactgttccgtctgaagtataatacaaatgctatcacatagggtgttttatcacgtaagatttttaaaatcactgaaataagttcataacattgtacatgaatttcacactttatttatggactattttttcctgcaaaaaataatagctcataaaaatgaagtgaatactgagtgcttccttttgtgtcagcaactcttccaactgctttctgtgaatttgtctcctgtaatctaatagtgtcaagtactattttacaggtggggaaacagaagcttagaaatattagctttgttgcccaggatcacaaagcctataagcaatggagttgggatttattttttcctctggccatctgctgccaaagcccatgtgcttaccactcatacactcctacttactgtagagttaggatctttgaccagcatctcagaattcacaagtctgctatggagagattcttcttttcagacatgcttgaagagaattttgcagagcattagttgcctgatgactttctaataagcccaagggccaggggttttttttgtttgtttgtttgttttttcttattaccttctttgatacctcctcacgaattgctgaagcaaatgcagttagagctggattctcaaccctggctgtgcaccgggatcacctgggagtctatagaaagtactgctgccttggtgccacatgttgagggtcaaggtaattggtctcaggtgtagcctagatgctgggtttttgttttgttttgtttgttgaaaagctccctaggtgtttcctgtgcagccaaggttgagagggctgctctgaaagctgagctgctgtgctcatgcattggcctacataaggtgtgcagctacataggtgcaactggcagagtaaggtgggccacaaaaatgaaatcattctgttttcgtgtaacaggatctcttagtaatcctgagcgtttaatatcttcatatcactccacagaacccagtaattccctaagaattcacaaatggattcttgaacaacagtctaggtggtcccgttcatcgtatatatgttttatgacccctggccttataacatgtttgtgatttgagaggcaataccgtctcaaagtctggaaaagcactggagcatagaacatgggactgaaaatggacaagttctgttgaaaggaaacatttgtttatgtcaattaactgcagtggtaaaagaaacctattctttacatggagctcttaatatttctttagtaacccacactacagcttttagccggaggacatgtcatatgtaaccccttccttatgactgtgacagagcaaaatggctagtgtccaggaagggagccacagccctagcaaaatataaataaataaagaccataataacttacatgcccatcactaaattattattagccaaggagtggcaagtagatgagctgttttctgtgattgcatgtgcatgcaattatgtttctgtctagagtaattaactattcacttgttttcttggaaacaaaatagattatataccatcacatgattttcactgcagaaaacaaatagctgtttagtggtacaacattccccaccccaccctcaaaaaatccgtaagttcctcctcccccaatctaattttggtgtctcgtgacttttaaaaatcatgattatttagttctaagttcactatgctgtcatattaagggtattccttttttaaattacaaattagaatttatgttttggcttcctgcttccttttttttctttctacatccagattacatttgtaattattttctgcataacttcctatgtcctgtaggtaagttttcttttttctgagaattgtgttacaacatggattaacagaatccttggaagcatgaagacaaataattgcctacaaaagacacgaattgagacaaataataattgatatgcttgaggtctaagttaatttgtaccagtagcctataggattgtttttagctggagggcagagagcagaatcctcttggacagctcccccccttggtaaccgccaactgtgaatgcacagaacaatgagtgctgaatcagggcctcactaaaaagttgtcattttgattttttctcaattaaaatacatcatgtgtgatattagagttactgaaattattatgccaaatgatgcattgaccttgtagtaaattttgtgacttctttaaggcaaaccactcagccgtgcactgaaacctgagctatagaaaaagaagagtaatggcattgcattgacagtctgttggttttctgatccatgctgttgccccccaggactctaagagccctgggtctttgtcagattcctttcagtacctcaattcctcgataattgaaaaataaaataattgtggtgagctgaggaactgtgggtcaggactgatgtattacatcctttctttctctgtgtgcccagattgccacctggctttctcatcattctagcaccctcagactgcgtctggatctgaagcatctgtctctgtattattccacactcttggtaaaagtcactaaggttcagttggccatatgagtgggaaatatgagtgactgcttgaagcaacacacgctaaggaagggagagaaagagaacacctcatcttctcctgtcagtctcttaaagtaactgactcagacaaaaggcaagagagagtagccatggcagtagctattgccttggcctgggcgacccagtgttcatcagctgcaagagctcagtacagcctgcatggcacagtttcacacagagcagaaacagccaagagggtgaggactgtaggaggactgggttttctcagctatctaagattttttttttttttttctgagatggagtctcagtctgtcacccagcttggagtgacgtggagccatctcaactcactgcaacctctgcctcccaggcttaagcgatcctctcacctcagcctcctgagtagctgggaccacaagcatgagccactatgcctagctaattgttttgtatttttggtagagatgggatttcaccatgttgcccaggcaggtctggaactcctgatctcaagtggtccatccaccttggcctcccaaagtgctgggattacaggcatgagccaccgtgcctggctagaattttttttttttaattgagaaacttcaacttgacactcgacttgccatgataataaactgcttagaattgccgtcccaactatatatgtttcaggatgtacctgtaaagaaaagccagtctgatgaatatgcgattgaatgtctgatcaaccatgacttgttttctgggctagaacttgttttttgccagaaaaaaaaaaaataagtgtaattcaagtgtatgggaaaagatactagtccaattcctatggcatagtttgaattgttttgttccttcttctatagttgcattacgttcgccattagtgacccctgcagaaaggttaatcaatccatcagtcaatacaagataaaatagaagtctgggtttcaggacccaaagcctgacttttctctttcttagatacttcagctgacttccagcagctcttgctctggctcaagatgagaggctcaccctccttggcattagagtccaactgtggtgcagtacctctgactttatcccttcatcctttaccttcagcggacattaatctgcctccctgcagaatattacttaacttcctggggtaggaagtgaaactcaaatgccataaaaagcatgcctttggtttagtcagacctagagcccacaggaatgatttataatgtataggtttatcaatgaaacatttttccactttagggaacagacattattctattcctggcaataaactaaaatagatgctacaagataaacagaatgatttcaccagttcagcctttgtgggacctaatacattataagaaaaatttcaaataaattacaaattggagttgtgtcctgcaattgtataagacggttgccattgcaaagtgatttctgcttttagaatgaatgtggttttcctgcagttcaatgtgacacttatctgagcccgacagtgatagcaagacttatgagccaagcccactgttggacctgcagtgccatctacagaatagattggataatgtggattctgtttctcttctgcacttcagataatgtagccacaagggaaataagatgtgtatgtgtttagaattagctgtgtacatacagtaaggctttgttgctacatagaaaaatggttgcatatttgcaaaatgctgttgctgtacttaaggctctattacctagactcctaaggcaaaggagtgttgtgtttcctattaaattgatgaactggatagcccatttgtttcaaaaatttgtttgataatctgtgtaagatgactttctggttaccttgaatagatcgtattggaatgaatattagtttcattatttatgtatttattatctctactgctcatatctgtctccaactgccagaacataatcaccatgagggaaagatttttatctattttgttcactgatttattccaagtatttagaacaatgcctggcacaaaagcaggtcttcaaatatttgttatttgactgaataaatataactgtactttgctagtaagtagaacaaatgtggaaagatagtcagttgaattttggtttgtatttttaaaatgggcacacctatacctcttcttcctatattactgttgtactgaaaattacgtgaaataatggatggaaaagtgctataaactataggtactataaaatttaggtattttcccaagaatctttttttttcttttggtagagctccagaaatttagaaaatgtaaaacatcacccccatttccccccataatttcctgaagtacttttaaaatgtatatatctgagcgccacatcacataggttggggcctgccagtgttcatgtttattaagaatctcagatgatcctgaagcatgctattataatatttgagaacttatatcattaaaaaggggttgaaattgaattgaattcaaaatggaagttacacctttaatattatcctcacccattattcctgataggaagttatttctgactggatatatttctttgtcttaagggaaatacataatattttaattgctgtatattatttagcttatggtatagagtattacctgacttaaaaaaatagaataaaaggatctagacgtatgtagtaaattaagatcattttagtatatcaaatttattttagagaatttgcatatatttcccaaggtagggtacaaatactatatgaagcaatataaaaaggaagcaaaagaaaaccagcctaagtttgtataagacagactttaattttatttaagaaattccacttgttaattttggtgctaaaatgctgtagaggatattaatgtgctttgacatattataaaaatagcttttttgcacggaggttatttctctattgtctttcttaaggcttttctgagaaataaatggggaaacaccgtatctttccccagatttgctaattaaccatgtaagaattaaaacattctttgtgttataatagttctatagatagatatatgctttcatagcacaaaagtatctcttaggcaagttaaatgcatttttacttattttatatttggttttgtcttgagaacagtgtctgtaggctgagtcatcatctatagcatttgcttcacaatatgaatgaatggaatatatatttactctaaaacaaagaggaatattttggatagtggataaaggtgaaatttagagtcagataagccttagatgcaaattctgaccctaccactgggcgtcttcctctaactcaccttctaagtatattcattatattcatatattcacacacacacacacacacacacacacacacacagacatttatttaagtggtgtccatgtaccaggtaccactgtgctaacgtgcctgtgataaatcaaattcaagaattcaagggctcctatgacattctgggagggaagtgataatataccaagtataacaaaagtgtaactatcaagatagacagtatgataagtgctatagagtaaattagcaaattcaaaacacatagaataatggaggaaggtcccattaataatgtttctgtgaaagatccctttgaagaggtaagatctacagaatgagaaagaacccaccgcaagaagagctgaggaaagggaatctgggcagagggggaacaaatgtaaaatgcaaaggccttggcgcttctgaagaccagtaaagagacctaggacagggaatagtggctgaatttggtgtggatatgagagaaaaaggtaggcaggagggaaaactggtaggccatcgcaggaggtgtgtgttttattcgaagagcattagggaatcatctaagggttttaaccagggagtgacgccagagtaaactatccaaaacatcttgttactctcctccctaaatagctgatggatgctcattgcctacccagaagacgaagctcaagcccatttactaggtcatcaagtcctttaggacatggtctgttgttaaatactcattcctcactattttgtgccttgcccttttcagtccagcaacagcaaactgccttcagactccagcacctcccaaattgttcccaccttcctgctgatatttctgctcctctacctgccaatatgctctcgctaaggccagctcctcgctttttcaaagagcctttctcccttgtactcctaccccgaccattacaatccagaactcacagtaccacatgcatatttaatgtcctcatctgtttatgagtttccctggggacatgcggagaaaactgccaaggagtgaagatgctttcagtaaatgttgcatgaagattttgggtaaacgtagctgtgcggattaataagtttgatcaaatgccaaggtagaatagtggcacagtcttgagtagacagtaggtgctaactagatcatcattcacattcattctccttcctttccccttgtctgtctggcaagcttttattcctcttatcatgtgcaagtactttacaatggacactctgccactaggccttgcaaaaaggggtcaaatcctggatctgtctctagagggcttagagtctagcagaggagcgggagcagattcataaaagaacaagcagatatacaaatgcacaggacgaagtgataaatgagattatgaacaggaagagctaaagtcttagccttaaatgaaagtctcacctcatttgtttcttagaaaagaaggctggagaaaaattttgcattattaagccttcattacttttccaaaatatcctgcggcatgcttactaatgtattatgaaattcttatgaataaataactctaatgtcgcatctcaaaatatgtgaacaaggggtattttttcaagttcttttctgcatatttcattttgcatgttacctctaagaaatgctgtataaacagttggatatatttatagaattgatgtaccataaatcccattactcctttagataatcatgcataactgctgatgagtgtattaacccatttttactatataaaacatctttaaatggcttctagttttataacatacccatggtcaaagcattttaaagtctgtaaagataatgttcataaaaactaatttgaggctgggtgcggtggctcatgcctgtaatcccagcactttggaaagccaagacgggcggatcatgaggtcaggagatcaagaccatcttggctaacacggtgaaaccccatctctactaaaaatacaaaaaaattagccgagcatggtggcgggcgcctgtagtcccagctactcaggagactgaggcaggagagtggcgtgaacctgggaggtggagcttgcagtgagccgagatcgcaccacctcactccagtctgggcgacagagcgaagactgtctcaaaaaaaaaaaaaaaaaaaaaaaaaaaaaaactaaaatacacaacagtaaattgattcaagttagatcttacacataggcatttgagctccattttaattggctttaacattacttgttcattatttagttttgcaacagtctaaaaacatccaattgctgaacattgaaggcatgagagatcatctttccctgtcaaataaaattgcaagttctaagaaacatcaatataaatattactcatccctgtaagcctagcaagcacagtgctcatgcatcctgtttgatctgaagagcatcatagtcacttggaagacataagatctacatagatgaagaagacagtatgtagcaaaatacagttatgtatgtatttcagaaaataggtagcaagaagtataagtataggagaaatcacggtcatgctctgggaaggcctttgagttgagccttagcaattgtctaagataaataggcgaaaaagtgaaagaggcaagtgagagagatggaaaacgaacattccaggcaggagggagaatatagatctacatgcggaagcaggaatgagcatcctggcaactgagcaacccaccttctccttccacttaaaatatcctggaacctaattatcatattattacaggctaaagataggcctgtcatacaccccagtgaaggcaatttttatgctgcttcatatataacaggactgaggagtacagaggtttcagcacccgttgtagggaaagaacagatctgagtgtgggctgagaaaggggaggagatagtgaaccgaaaatagtactttgtctcgaccaaagttttcaagttccttgagggtattttcaactaagatgcaaacagcaactgattcttttaccataaaaacaaaagaaattatgttaaatccatctgaggtaactcgacagttaattttttttttgctccccttttctccctcccatgccatccttcaatttaatgtgttaagattttaaaatggcaagcatgaagtgtaacaaaacatgaagtttcttacaaagttttttagctatatttatacatccaatagcaaggccagcctatgtgacataggcatcatttaactagagaaattcttattttcctaggtctttgtaccttattacagtgaattaatacaatttaagtcttgctagaattgtatcctttaacaacaaaataatgttgctatcacctaggtgttatattatttaaatatatcttttcaaaataaattgtgttatacataaatattcaggtaaaggtttaccattttagctggatgtggtggctcatgcctataatcccaacactttgtgaggccaggagttcaagaccaacctgggcaacatagcaagaccccatctgttttaaaaaatgtagctgaatgtggtgatgtgtgcctgtagtcctagctactcgagagactgaggtgccggtgtagcttgagcccacgagtttgaggatacaatgagctatgattgcaccactgcacgtcagaatgagaccctgtctctagaaaataaaaaatgataaaagaaagctttgacttatttgagcacgtgagaaaggggaagaggaagaaacctttattaaatgcagatttaaatgccttgtgcagtcttaggcattatttactcatcataaaaaccctataaaatagctattagcattttcaaattagagattggaaaacaaacgtttagacggttcaagtcctttaaactaggccatatagagtagaaagtatataagcatgtgaatgatacaacaagaagtaaacagaaaccaattcagtatatgtctggccaatgaggtatgattctgagtccacacacacatacacacacacatgcacacatgtgtgcacgattatgaaaagaggcaggagacatttcggaatacaggaaaaaaggaaggtcatttagtttcctgtcagtgaccatctttagagctttagtatttgtgatgacacccaaaaggtgtcatggataaagtgaacatgtagaaatgtcaaagctaagtgtaattttgaaaagaacctgatgtaaaaactgccgagataaagcccggttgaaaaaaaaaaaagaaagaaaaaacagcaataggaagatgatgattggggagatacatgagcaagagcagagtggaagatgaatggaaatataaggcagctttgcataattatgcacttcatgtggttatatacataaaaagagaccatgcttaaaaccacagtcccaggaatgagcaccccaaaggatttgtgccttttctagtctgaagaaatttggcatatgatggcccatatattctggttgccatgcgctattctaccctcctttacccctctataggcatgtgatatgcgggggagagaacatgtattactcattaaatgaaacatgaacgggcgagacatatatctttgatagtgttagagaatttgtaggcaattatattataatcactctcaatgtttctgtgtttctgattttggactgttcatgggtggtagctactgcaggctgtcattaaatggatgcaaatggtaattgtaactgatgaatgattgatgatggctttattctgtactcctggaaacagcctctggcctaccagaaaagtaacctctaaccagagagcaattaatgtaaactataggctctagcttgttttctcggggtggctgggtagggttgggggatatggcatgtctttggaacattgaggctgtcttttctggcctgtgcctttccccaagtctttttactttctgtctcagagaattgctagttagagtgagagggctaggaaaagaatctaggatttcagcatggtaattcagtcaaatatggctggtttctcaaataaaagtacctgaactggaaagctaggcagcctaggggtggatagggagcctacacctctgggttgaagaatcatttgacctacattacaaaaaaacaaatacttcagtagtactgcatttcctaaagttttacaactgcttatatagattatctaatgctctttagataacgtgatgtctcagcatccttctaaagttgtgtgtgtgtcgggggaagggcagacatatcttggtcacgtttattgactacatttgacttcctgaagaacagacatgaacaacatatatatgggggtggtaattttcttctctgcatccagaaaacttagtcctatctagttggcccatctttttgaactttagtcataccttgtagattccagttgaagtgaggttgttaagacaaacataaacatgatgaaaaattacttagaatttaagaatgccaagaaattgatgtattaaatgaggttactggagatctatttatgaaatgggagcgttccctgaccccctcacaggacttgtgacaggggcgtggctcatttgcttggcccacacccccttacaggacatggggcatgcagatgggccggtgcaggagctgggccaagtgcttctgggctctggccccacagtagcatctggaggtgtgttacaattagtgctcttttagcagttgctatccatggatggctaagtgttaaaccagctcagtggagagttagggtgacatccttttacaccctgccctcttggtacccgggtccttgtctggcatccaggaagaatcaggtcatatggacttgaaggatagtgaacgtggggattttactgagtgatggaggtggctctcagcagaatggatggggagctggaaaggggatggagtgggaagatgatcttcccctggagcttggccatcccacagccaatctcctctctgactgtccccagccaaacacctcctgatgttcaaatgctccttctcttttctccttctctgctgtacctttctgctgctgttctgttcctctgcttgtggagcttagggtttatatgagcacaggataggggtgtggcaggccagagtggtcttggaaaaggcaacatttgagcatgaaaacaggaatgcctattcccacttagggccaccaggtttccaggcttgaggtgggggcctttgccggggaagcaccctcttctacccagaatttccttgcctcctgtccatatcactatttactgtgttatctgctagttcatagtgataaccctagactagagaaggagagaaataggagtttggaggggcagccgtgagagagcagaaatcggcctggaatcagaggctctcagttctagtcacatctgcttcatagttgagttatatggccttgaagaaacctatatttcctgatttactaatatgagagtcttttcccctgcactcccgtggcctcctttgttccacaaagagattggcagaatttgcattaagtcaattgaaatagaataccaaaatggagaaagaagtcaaaaccatggtgaaaaatccgaccacaaatatgtaggacaaaaatcaaataatctttatgatgcagggttgttgctaagttcaaaaaagataatatattgaaagaagtttatactttaaaggtattgactgggtggtatttcagatagatacagattcagcaacaaaatcttggagctgaataagactcttactatttacaaggtttggttcggtttatattgtttcataaataaaagtattaactaatgccttcttgtcaaaataggattttgattttagtaaaaattcaaatattcattaatagacaaggaggaaatggactatatgtgcccaaagggtcatagaaagaagacagaattaaaaataagattttaaacaatatatgtcttaaattcttcatgtctcataaaagcctcataatttgcttcatattggatctgattctatccctcaaactatggagtctaaatctgatctttctagcacacgccacatgtttgaagtcaattaacgtgccttggttgtgaacatgtatttaaggtaaatatccctaatttctttaatgactcttcatataatattttctccagataccttcaacacactctcctgtggacatgtggcagtagtcaaagtctctcttaaaatgtgttgccaagaactgataatggtgctctaaaactggattgatgagtacatagatcaataggttgttactatccttttttgaaccttacggttattcttccatatcacttaagaatagcttttttaatagtcacatcacaccactatcaactcatactgagcttacagtcaactaaaactcttgtgtttctttcatatgagatactgtaggtcaggcctctgagatactgtaagtcagacaccctaaccttgtgttactattttaaatgtaattgcaagaccttattactgtccctatttcattttatcttgatagtttcctagagccagggaaattttttttaagtttgttttgacgtgatttttatgttagctggcacatgctcattaaagaaaatttagaatgttaaaaaattaaatatgatgtatcttcaaaattaaaatttaatatcagtaattatatcattcaaatataactaataacagcagtttttatatattctcattcttcctatgtgtatagttatgctatatatacagcttttaatgctgttttaaaacagacttagaagcatatcatatgctgctatatagtcctcatggttatatatttattacctacacaatattcaatgcaatgtaaatttgtgtttgtttcctttgaacagtgagcgtgcttttactattataaataacgctgtaatagacatcatcatgcaagaagttttatctgtgtttaagatttgtcctcttaggataaatgctcagaaaagaaattactgagccaaagaaaatgaattctaaaaatgtcatttctaccacttaattagtagtaagtgtggagacagacaatgcatagacaatatgcttagcctctaaaacactctttacttctattttcattacacatgtaattacttcttcaatatgcgccttcattgagagcgtatccattaggattcagtccaattgaaagaacaaaggcccaggatcacaatggtttaaacacaggaagggtttctttctcctgtgaaagcccattcaggtcagtctagggatgatctcgtggttccacttcacacagctgtcagggacatgcttcttctgccttgctgctccagcgttcctggagcattcctgggtgggaccttcatgctcatggtcagagatggaagctagagttccatcccatcaacattccagggggcagtgtagatataaagaagcaaaagcttcagctgtctctttaaggaaaattcctttaattgctacacaaattctgcatatatctttttagccgaaactttctcggatttacctagcttcaaaggaggctgagaagtattatctctattctcaggaactatatatctggctaaaaatcagtggttctcttcttctggatgaagagaaaaatggatattgggggattacaagccgtttttgccatggagaatagatggtgtttctttctgtttttaacctcaaaacctcaggacctaaagacctaggtcaaaaacacaaaatgtgtaagatttctgaatattttttgaattgaatttgcagttcttttaggtgcattttcccaccagtcacaactttcattatgccacttgagccatttatttctaaatccatcctgtaacttaaattctgatggaattcagagaagatacaactcagcaccagacaactgtttttagccagtattgctgcagcccaaatctataaactgtggggtttgtattctgttccatatgagatctaccaccacagaggaagtttgtttagaaagcattgtgaattaaaaatgtatacagagttattgtgtatatgtgtatgtagcacaaaagtagaaaagtgatgttctccaaaacatggaagctagggagagccccactgaattgaattagagtcatcattttcagtaggttttatacaaacaaaagataaataagaaattgggaggccaggtgtggtgactcactcctgcaatcccagcactttgggaggccaaggtgggaggattgcttgagttcaggagttcgagaccagcctgggcaacatagcaagatcccatctctaaaaaaaattacaaaatcaaaaaactaactgggtgttgtggcacgtgcctgtagtcccagctactcaggagactgaggtagggggatcccttgagcctgagaggttgaggctgtagtgagctgtgattgcaccactgcacttaccctgagtggcagagcaagaccttgtctcaagaaagaagaagaaaaagaaacaattgggccatttgacttaaagagcctaagaatctaagtgggtatttaaaattacccgtccattattcaaaggcatgaatgtttgtcagatgtgtgttcacactttttaaaaagattatttgctttctaccccctttaaatttaaatacgaagaaaagaccaggggcagatttctcatccctggaataaaaatgtcagttttgtcagaatgtgaaaactttgacaaatgagactgtagcttgctcagcggtttcaacacatgtacaagggtgcttggtaccagagtgctcctcacctgttcagtcatctgcagtgagtgacctgacacaaagtttgtaaatttaacttgggaagagtgataaagaatacagaaacctgaagtatataaatgaattggaaaccaaattatattttttgacacttacaaagaaaagatactcatttgcctggatttgaatgtatttagtttctgtcaaatatatatgtatatcatactagagaaccatattgctcaatttctttccaatttttctttcaaagctgtaagagcaaaattcacaaccctaataaggttttagaaataaagaacattttctatcttccacctgttactgttacaaccatttaagaagtggagtggaaaaaaaaaagaaaaaagaaaaaaaaataaaaaataaataaaaataaataaaaagtggagtgaataataaatctaaacatttctatattttgctatttgctacatttctatttcccccaactaccatccttttcatttatttttgtttttaacttcagcttattatcatgattacttcataccagagtatacaaagcttgactgatacgatttcagaaaacaatgtcattagtttgatatattgtgaaaaaaaataccttatagtattgaaaactatactgactaatactcaaagaacatgacctttcaaaattagttttcctctttaccaaaagaaggagagaggagaagaggtattcctttccctaagccataggcgctcttgagattttttgaattttttcaaataccagacaccatgcattttcatacttagagtacctgttctggtaatctgataagcattcattcagcgtagcttcctatcagtcgagtgtttggtttttatctagctgtgattgttttttttttccatttgtatccagaaatacaacacttagtagattatcttctaagcatacatggctgttttaaaaaatataatccttttttctacaaaacaaacctatccacatttctccaccacatctcacgtttttcggggttctcaaggcaaaactctttttactgtgggtagaacagatagaccaactgacccttggagttgctttttaaatgttttttaagtttctacttgagcctagcataggaagaaaaatgcagtgactgcagccttattctttcaaaagttgttgtaaagaattcagaaatatgtctatcaaaggatatttgggaagactaacttttaaagtaagtgaagcataacttacaaggatgcagagataacaagaggcttaagtgaaatgaggaaagagagaacgtcttacattggatgcggttctttctcaggcctgtgaattgtctgtatttctttgaattttaaacttgtttgaattattcctttattgctgttctcagccattacattgatctcggagaagcaagcagggcagttaaactctcgttccaaagtagaactgcctgtggattgattggtagtaaaggcaaggtgactgaaaagggactgtgctttctttcttattgactagaagtgtgtctgtccgattagtctgtgccaagtacagaaatagcaggtgcacattgttgaaggatgtagcaactgaggttttgtgcttccagggaggccaggaaaattcctgccccaaatttatcaccactggattgtcgattatttttcagctctattgctgatgattcactctttttgacatttcaagtcagctaacaaatatattttaaatccaatctttatgcatggccctgggaattttaaaggattcaaaaattaataaatatggagctctccaggaagtttgaatctagatgatggacagacactttcgtgtataagaatgtatgttgtgtgatttcttcaaaccaaacataagaacaggttcttattagaattagaagattctaatttagaagaattagaataagaattagaaaggttctaacttagatttagaaaggttaaatatactagaagtactaacaagaacaaagctgctgttgatttttattgtacaaagctagattcaagataaactatgtcaacagagatataaataagaaatttgtagtaaatattaaaggtcataatgagggtataagtatgtatacccaaattctattgcacaaaaacccatatagcataaattaaaggaaggttaaaaaaagaaactgacaaacacaatggtgattataggctttaattaacctctgtcaaccccccgcccaagacagattaagaaagtaagcaaccttggctgagcatggtagctcacacctgtaatcccagcactttgggaggccgaagcaggcagattacgaggtcaggagatcgagaccatcctggctaacatggtgaaaccccatctctactaaaaatacaaaaaaattagccaggcgtggtggcggacgcctgtagtcccagctactcgggaggctgaggcaggagaatggcattaatccgggaggcagaggttgcagtgagccgtgatagtgccactgcactccagcctgggtgacagagcaagactccgtctcaaaaaaaaaaaaaaaataagtaagtaaccaaaagatgtgaaaggaagaaaagtaagtaaacaaaaagatatgaaagatgtgaattattagtaaggattacataatatggataaatatatatatacatatatatgtttatacatatatgtatatgtgaaatatacataaatacaacatatatatgcatatgattaaaacctgtataacagaaaccatttttaaacttgcttagaaatttacaaaatggactactaagtgacaaaaacattgttttagccctgaaatataaatacattctacagtctgacccaatgcaataaaatacaaaatataatcattaacaaattcataactaacatatcctcaaaattaaaaaatgtacctttaagcaacttttaaatcaaaaggcatatttgcacattttaagaattgaaaaataatccccgcacacctcaggatacagtatatgtagcttttaatacttatatttttaaaagaaaaaggatcagtttttaagtcaagaaggcataaatggaataatacagtgaatataaggaagtcaaatgaaagacacaaagatgatcaaaggagaaattgtaaatcacaaaattgttaagcagtcaaaaaacatttgttaaaaagagacactactggacagtgagccatcaagaaacaaaaaaaaggagaaatcacaagcaagtaaaattagaaatgaaaaagagcgaacatttacattacagattaagcgaatgataatttgcaagtgtctaacaaatgcacttcaatctctaagtatttcagcaggaatactgcactacggagtagactcagacttatgggtttgattcagagtaacttaatgagagcagaattaggaaaagatctacgactttgctgagattccaaaatattacaaaaaggaatataaaatactatattcataagtagctgattcaattaaaatatttttctacccttccctcttgaaatggctgtgtcatttttaagaagaaagttgcttattgagaaacactttttcattaggaaaatgaattcaaaaatcatataaaattgcatatgttgtgattaaactgtgtaaaataatcacttatgtgcataaaggcagaaagtgggaaaacataataagatgagaggcaatttttaaattttccagcctttccagaatactgtttatgtaataataaaaatgcagaacaggccaggcacgatggatcgtgcctgtaatccctgcactttgggaggctgaggcgggtggatcacctgaggtcagatcgagaccagcctgaccaacgtggtgaaatcccgtctctactacaaatacaaaaattagccggccatggtggtgcatacctgtaatcccagctactcaggaggctgaggcaggagaatcacttgaacccgggaggtggaggttgcagtgagccgagatggcaccactgcactccagcctgggcaatgacagagtgacactgcatctcaaaaaaataaaaaaaggcagaaaaaaaataaggtgtcttctgcatatgaacctaagctgttctatagttgttctcctggtaaagggacaagtacagtctacctatcattatcaaattgtaaatgtcaaattgtatccaattatttcttcattaagccacctaaaatgaaccattctctcagctgaatgtattctttttggttgttattctttaaataccaagcattacgacagttcttagagaaatcttcagtacaaactcagtttgtacattctatgggaagtcaaacacctttcttagtaaattaacagactctacctagtgaagtacttccagcatcatttattgaattcacttaagtaaaagggaccaagagagcacattagctactctactagagatgacaaatcttagaaatgattctgactttggaccttcaaggggattacttggggtggctgtcagactgttgagtcactcagacacagagagacttcctaccatgttcctaagactgtctcagccattgcataaatacaatgatttattttggagctagtaactgaattgctaattttaaaatgtcttaggaatttgttgaagtttgcagcggtactatgtatcaaaagatgctatggaaaatctccattgctgcctgtactgtgtttttgtgagctaaacttatctattttatgatagaaaaggaggaagtattgtcttaagttttgcctctgtttagtgtcactaaaacttttgatcttaatgcttagatgattttggagagagttcttccagaattttttgcaagtcattaaaaattatatatcatgtcaagaattagatgaattgatgacaactagggtgaaatatgacctactttatgtatatataaatatttcaaacactgtattcatgtggaaaagcatagattattttgtttctttaaaattatttttacttaggaggggagtcaacagcttaaggtaatactgctttaactttagtaattaccacaaagtctctagattacaataaaatattatacagcacattgcctaaagaaacacatactattctattactttctcactccctttaaataaaatcttcagaaattctactgaggatcccaagccacttatagaaccatgtctttgataaagagctgcttgaaaactaaatacattttaaaataaaaatttatcaatttgtataaaaattacattgttgaggtaatgaaacagtacagacacataaaacatacaaaatggaggtcctatcacaatctaaccacataggttaccacttctaacatttgacatttttcttcctagaacttttcctatgtctatatatgtatatttttaaccaaaaagtaataatgaacataatcttccacacttgctttttccacttaagaacatattttctgtcttttaaatatacagtcttatcttacaaatgagatctaactaattcatttaatatgtgcatagaattatgttgtatagagctacggtgacttatttaactagttccaatatgatttctatatggattatctaggttttttattacagtgttgcaatcaaaatccttgcacttgtacttgtatttaatataaatagtcaagaggacccaatgtccagatgtaggacagctggatcatggggtggaggtgaagatatatatatatcctcaaacttagtttttttggtcaatctagtgtagaaaatttccttgcaatttaattgttaatataattacttaattgttataggctttgtaaatttgtgtttttcaattgaccactctttgtctttgctcatttttcagtaggctcattcatcttcccatttattgaacaaattcttttctatcatttattgaactgtatgtattgtaaatgaatttgtactttgtcttctgacatggtaaacacgtgcttatttattttaccttctagaaactttgaattcttttgataatttcttgaaatgccaagtttagaaaaataatatagttctcatttatatttctatcattcagagttagcaatttcttgtttttgtttctagtccttttatttaacttaaataaatgaaacatgtaatacattgataccaaagccagataaggacacttcaagaaaagaaaactacaggccaatatcaccaatgaacatagatacaaaaatcctccatgaaaaaacatagcaaactgatttcaccagcacattaaaaggattattcaccatgatcaagtgggatctatccctgggatgcaaagataattcaagctaagtaaatcagtaattatgatatgccacattaacagaatgaaggacaaaaaccatgtaatcctgtcaatagatgcagaaaaggtatttcacaaaatttgacatcctttcattataaaaactctcaacaaattaggtatagaaagtatgtacctcaacacaataaaggccatatatgaaaaacccacaactaacatcatactcagtggtgaaaagctaaaagcttcctctaagatcaggaacaatacaaggttgcccactcttaacacttctgttcagcatagtactggaagtcctagccagtgtagttaggcaagagaatgaaataaatgacatccaaatcagaagagaagaaattaaattgtctctgaaattaaattgatctcattataagaccatgtcatctgtatagacaatttaatgttttatgttttttataaatagaaaacataaaaactcctccaaaaaactgttaaaataaatgaattcagtaaagttgcaggatacaaaatcaacatatgaaaatcagtagcatttctgcaccctaataacaaagtgtttgaaaaagaaatcaaggaaacaatcccatttacaatagctacaaaaaaataataaaatatttaggaacaaatttaaccaaggaggaaagatctatacactgaaaaatataagacactgattaaagaaattggatacaacacaaataaatggaaagatattcatgttaacgtattggaagaattaatattgctaaaaggtccatcccacccaaagcaatctacagaaacaatgcagtccctatcgaaatgcaatgacttttttttcccacagaaatagaaaaaacattcctaaaattcatatggaaccacaaaagaccctgaataaccaaaataatgttgagcaaaaagaacaaagctagaggcatcacaattactgatttgaaaacatttactacaaagctctagtaatttaaacggcacagtacaggcataaaaacagtattgcattttcatcttgctaatatttgcatattaaataactttatcaaactgtgttgttttccatagtttctagttgattatcataggttctgtaggtttgtcatctgtacctcctctctgattaacatgttatccaaatcagtagttctcatctgaggcaattttgcttcccatgggacctttggcaaatatctcaaggcattttttgatgtcactacttcagatcctactggcatctctgggtggatgttgggaggctgctaaacaacctgcagttcacaggacagcctccccacaatgaaaaaattatccatccccagtgtctctgatagcatagttgaaaaaccatggttcaaatattttgcccatttttattggattgttgatgagttgtaagagttctttatatactctggatacaagtgccttttaaaatatgttttgcaaatatttttcccaggctaccttttcattttcttaatagtttcctttaaagagcaaaaggtttcaattttgatcaaatttaatttgctgactttcttctttcataattcatgctttttgtgtgttatttcagaaatctttgtctaacacaaggtctctaaaacatcatcttgtatattccttttttatgtatttttactttttttttttttttttttaagagatgggttctcactgtgttgcccaagctggtctcaaacttctggactcaagcaatcctcttgcctcagcctctcaaagtgctgagattacaggcttgagccactgtggccagccctttttttcttatgtttcttctggaaatgttatagtttttgctcttacatgtagatccatgatacatcttgaatttatttttataaatgatgagttaaggtttgaagtccatgtttttgcatgtggatatattatagttgcaacagcatttgttgaaattttttcccttgcctaccgaattgccttgaaatttttgttaaaattgttcatatatgtgtatgtgtatttctagactttctgtgccattgttgtatgactattcatatcctaataccacggcgtcttggttactgtagctttataataagtcttgacatcagatagtgtaaatcctctagttttgatctttttcacaatattgaatcttctggcccatgaacacaatattgttccatttccctgggacttaatttctttcagcgatgttttataattcttagtttatagctcctgcacatcttttgtcaaatttatcaccagttacttcgtatttattaaagttatcttaaataaccaggttttacaggctttgttattaatgctgtattagctcacatcaaaaaaagtaattgaagagcattttctctgtctttgtactctgtttgttgaagatttagaggaattaacaaatggagcttttgtactcaaaatgctttcctccttacttcttaatcaaaggctacccatttatttgaaaggcaacttttatctctctttctacatccaacttttctatacagtgccagtgtagtaaattttgtagcaattattctttctataattcatttggaaagcatgctaactcctaccattctttatatatttatattgaattacttattgaatgcagttaaacttactatgaagttaagcttgtgtcaccttctatataaatttcatacctcttgaggattttctttagagcccctaacaggatgccttatgcagagggtaaggaactgggtctaatgcttggatgttcaaagactggtttccatcagaaaccttaaaatacaattattcttctgaggtagggaaattgatttttagcataaatattgcttgtaatactcctggctagtttaaagattatctggcaatttactgataattattgaatcactatttctctaagacacatgtctggcagtaatttcttttggagacatgttagaaggaaatagtgaaataatatcagaatgaaaaatcagggcaagacagactgttaacattctctttcaacagaataaatacaaagtagaccgaaatgtattattattattattttcgagacgtagtctcgctctgtcgcccaggctggagtgcagtggcgcaatcccggctcactgcaagctccgtctcccgggttcacgccattctccagcctcagcctcccaggtagctgggactacaggcgcccatcatcgcgcccggctaattttttttttttttttttttttaagtagagactgggtttcaccgtgttagccaggatggtctcaatctcctgacctcgtgatcggcccacctcggcctcccaaagtgctgggattacaggcatgagccaccacgcccggcctggaaatgtattattatgctttaaacttgtaccaggtgcaatgaaacacagaaaaaatgcacattattcacttcacatagataatgtatataacctaaaattgaccaacgtatttaaagttttggtgtgtgtgatactggaatgtatattgctcctgacagaggaataaaccgggaccctactgaaaaacagtagaagactgataaaagactttgacttcgagaaagtatcttgacaaagaaagcctatacctttttttaacacttggataataaagcagttttgtttttttgttttgttttgttttgttttgttttgtttgagacagagtttcactctgctacccaggctggagtacggtggtgtgatcttggctcactgaaacctccacttcctgagttcaagcaattctggtgcctctgtcttccaagtagctgggattacaggcaggtgccaccacgcctaattttttgtatttttagtagagacagggttttgccatgttggccaggctggtctcgaactcctggtttcaagtgatccacctgcctgtctcctaaagttctgggattacaggtgtgacttactgtgccctgcctaatagagcatttttaactaagggccagaaaaatgaacatgataggttagctggctagacagacacccagaaaagcagcttccttggggagctgttcagggttgacacaggcccccaccagcagagatgtgcctcgtcaggggttgggatgcaggtgggcacaggtctgtatccagacacaggtgcccagagggatcagaagccacataggtaagatgcatgccttcgtattacacatctctaaactgaggaaatccatttaaaaggaagattgaaggcacattttaagcagaaaaagaaagcagaaaggtaggatgtgttatctctgtaaggggcttcccgtcattttagcacctgctaatgaaggatcttttcctaccggttgcactggactctcctgccagcaacaagcaaaggcagcacctgacagggagtttgctggtggcctaaaatgtgggactccaggcctgaggattagtctggccactgatgtaaaaatgttagtcaatgtcacaactgtacaaaaagactagagggtttctatagaagttagttccacactggagaaactaatttggccagagaacttaagtcgttgatattcgtaataaacagaaaaaaaaaaaaaaaaggatagtacttcgtagctgaaaataattgatacatttatcagaactctaaaaatccatgaggtagcctttagataaacagagtatatattattagagatggtacaaagtataatattagaggtggtactaagtatattattagagatggtactaaaagacttgattatagcttttattcttataaaagttttctctactttttgtacatggtattatatattacattttttaaatgcctaaatagtgattttttttcaaatagaactacttaaaaatttgctggtgacattatagtaatgatctatatatttacctatccttgtttttcttctcaagaaagaacaagctcttgtggtcctatcctgatgaagaattaccctcagcctgatggctgttgtctgaggttgagtacgaggaaaactaaacaaccactctcaactccttggtcataagcacttaatcaacctagcatgagttgccaatattggaatcctaccttttgtgtgttactagtacctttctagaggattacctacctgtgctggtctttggggacacattggagcatattttcagatagtagttttaaaaatcacttttaggtttcattccttcatcacaaaacaaaactttagagcccgtcttcttacaaggagtttaggttatttttcctcaagggcatttatgcatcaacactttattttagttgatatttttctggctattttcacatgcttataaacctgtattttaatttactctcatccgtttaccaatttgtgtagtattatctacgcagttgtggctgttttccagatctatgggcctgtttttcagattatttgtaaaataaagaaacattaatccctgtagaccaactatttactccttttgttcagagttgattgattctctcttttttttggaaggctcaaaccaatttcctgttaaaaaccaaaatctttatcccaaccatcctttaccctgatccccaactaccactctattccatgctgaagcaaaattcttcagccaaccagaaaataacaaaacaaaaaatacttctttgtagaaccttaacaaaggacttttaaaaatcaacacctgccccatacacacatacacatacacagcgtgcccacctacacatccacgcacatgggtttaacgaattctctcattacatatccttttccaacccctcaaataactcaagaattttactcaggtatttccattttgagtctgatttatgaactctccattgtctggccacgtgccagccatattccacaattcataatctgtcaccagaagtaatggcccatttccaaaggtgaagcatgacagtactgtctgcatgcatcagataaacagattgtgtggccgctccgtgttctgtctgaagtcctaggctgaagagcacattaacctttcagcacagccccattttcactgtggtggttcttttcttttatgctcttcatttttcttcataagagccaggcctgatgaataacacaacatccaatcactagtgagcagattgctcaaaacccgtagaaggtgagtgggtgatggtacccagtaaattttaaaacatctcaaccttccaaccttgttgtatgaaatgacttcagaaagtcattggaattaagaagaagattgtttttattttttggttcctcattggtataagctttttcctatgacacttgatggtggggaatctattggcaacctcctccttttcttcacgtctaacacaagactacagatggacctctgtcgtctaggacttacccagcagaaggattcaggaagaaaacctaacttagataggccttaagtacaaggtctcattttgtttcactttcgtgaacctgcatctgtgtatactgctgggatatttatgcagagatacaagatttccctttcaagattgggacagttgtaccgcaggggcattcagtaaatttggcctggtgtaggtcagtccagccacctaagcaggatcacagacaagtagatgatcctgaatagattcatgataggagtgggcacaccaaaatcatcaggaaccaaatgtggctcagataattaatgttcccatcagtataggaactatggtcattttaaaagttgatctaacctcatcagagttaatcatctgcatctgtgtgtgtgcatgtgggtgcacccatgtgtgtgcctccacgtgcacgtgtgtgtgtgcatgtgggtgcacccatgtgtgtgcctctacatgcacgtgtgtgtgtgcatgtgggtgcacccatgtgtgtacctccacgtgcacgtgtgtgtgtgcatgtgggtgcacccatgtgtgtgcctccacgtgcacgtgtgtgtgtgcatgtgggtgcacccatgtgtgtgcctctacctgcacgtgtgtgcatgtgggtgcacccatgtgtgtgcctccacgtgcacgtgtgtgtgtgcatgtgggtgcacccatgtgtgtgcctccacgtgcacgtgtgtgtgtgcatgtgggtgcacccatgtgtgtgcctccacgtgcacgtgtgtgtgtgcatgtgggtgcacccatgtgtgtgcctccacgtgcacgtgtgtgtgtgcatgtgggtgcacccatgtgtgtgcctccacgtgcacgtgtgtgtgtgcatgtgggtgcacccatgtgtgtgcctccacgtgcacgtgtgtgtgtgcatgtgggtgcacccatgtgtgtgcctccacgtgcacgtgtgtgtgtgcatgtgggtgcacccatgtgtgtgcctctacgtgcacgtgtgtgtgtgcatgtgggtgcacccatgtgtgtgcctctacgtgcacgtgtgtgagttcatgtggcctatgtgttcaaactgcttcagagtgaaagtttccaagttttaagaagaaactgactgaattaaaaataaagagagcaggggcataaaattcattccaggaacgtggtaaccacagaaacagaagtgaggtgctctgaaagctgaaagggatatcagtcattggagatggggagtagggagggatgtttcttggtttgtttcttaataaagacccctggattgttcaagaagggaaaaggagatagtgagggaaaaagagagactaatggtgctagaaatggaggggctgatttttgaaagaatggccgagatcagcaggtctcccactggaatgtgtcttgttaaaatgcagattctcctctctagagctgtggtgaggactgagatcctgcctttctaacaagctccccagggatgctgctgctgctggctcacagattgcactctgaggagtaagggcatagaataaatgggcaatgaggagccatggaacgtaagaaaagggattaactctagatgagaaacaacaaacgttttcctccaatatctaaaagaaagattaaaaaacagaagtttgggcaagatggtgaaggacagaaaatcaatatggttttatcttccagtcccagtgttcaatatggaaggagaaaaaacttagagtgggaaattactatctacaaaacaccacagcccaaaacaatctcctgaggtgtcttttttctgttcttttttccccctttggtataggtatcatttactttggaaatctataatgcttctgttgtaatttaacttaccacatctttatatattgtctttttaactcttctacagttatctcaaaaagaaagttttagtataatatcttataagtagtagaagtcattaataattttttgattgatttagccaggaatcctgagttctggcttctggctcccaatcaatagtaaatcatgtagactttatctgcctccgtttccttacctgtcacataatactctttcctctccaccttctacactgctaggagagagaaattaggtcttaattataatgctactttgaaaaatctactcaaatttatagtggtcttcattgtagtcatattttatctcaacaactgacttttacattttatcaaagactttatattttctgtaaaatactacacagtaaatcttccggcctcactagaaaaaaatatttgcttacaatctactttctgaataccaaggactgctgatccgtagaggggagaatggagagagggccctgccagctgctgatttagctgtctccataggctcgctattgctcaagtactttttccatcacaaagaattggaattctatttaccagtacaacttttctgaacattttctagaggtaatatgcaaaaactgctgatgacacagagagtaaaaataaaactccctgtgatcaaatgtgtctccattaatctgcatctgcttcatcaaatacagattgtgtgtgcacacgcacacgtgcgcatgtgtatgtgtcttggtaaatgggtaaggagttaaggagtcccaatatcatctatactcttctcataacaagaatgaaaagaagggtctacactaccttggctaactggcacctcccatgtgctcagcaccaagctaaaggttgtgaaatactctaaaaacatgtaatacataatgtctgcactcaaggtacttagaatctatttgggacaccaagtaaacatatctaaaactagtcatgattggttaagcacctaccatacgtaagacagtgtgataaacacactcaggtgccaaatagcaagatatagccataaacgcaattaaggactcccaaactttaaggcctccacgtatcctgagtgaatcagagattactccttattaggcagggcaagtagtgttggtcatttagttcatgtaaatgatacactcacaaattttttaaaaagacaattctcaaggaatcaagaaaacatatgtgaacagcagagaaaatcaaatacgaaacatggagtcatcatagttccagtaaaaactcctctgctttatatttctgacttttttatataaataggctaaaatccatgctaatatatatgcagaaaagaaatgaggccttgctcattacctgcatatccttacatccctttcaaaaacctgaacatgtactctagcatagcattctgatctttattttcctgggggaaagaaggcttgtgactttgcgacacttagctggttctgtatccctctgtattctgcgtatatttgacttttctttggttaagaggtagaaggtgcttcttaggttttaaaggtaactttagaatgacccgatgaagaagttaaatgtctctttatgaaatagaaacatgaatcctcttttataaaacaaacataaaaagatgataaatatattaatcagattttatctccatagatccttggacctattagcacaatataatcacaagttgtatgcttatcacagccggtattgtttgatcttttttattttttgacagagaagcagaaggccttaatctctacattacttttagtaaagataaaattaaaatgatgtattgttattttgtaatttccttataagcacatattggaggattaaaatattacaatagaattatctgtaagcaaatatgttttcaaataaggctgagtgaacccttcattgaattaaaagactttaatggggccaggcgcagtggctcatgcctgtaatcccagcactttgggaggccgaggcaggtagatcacgaggtcaggagttcgagaccagcctgaccaacatgctgaaatcccgtctctactaaaaatacaaaacttggccaggcatggtggtacctgcctgtcatccaagctactcaggaggctgaggcaggagaatcacttgaacctgggaggcagaggttgcagtgagccaagatcgcaccactgcactccagcctggtgacagagcgagactctgtcaaaaaaaaaaaaaaaaaaaaagactttaatggttatgttcaaacttgaattcctcattttaattaaccattagatggttaaatgtttaccattttaaataaccctcctcaacttatttcatttatactgaaataagtcatagtactgaaacaaattatttataataaaaatacaaaaagtgcataatattcaatttgccaaaaattaaagaatttaaagcaacagatatttgtaattttcccattttggtcactgaacattcctacataaggtaatacttcactctctgtatcttaaataagcatttgagggatttaagaatatttcctaactacaagggctttcttattgtcaggagccattactgagggccattactctttgctttgatctcttcatcccattatagaacaaatttattgtgtgcctattatgttcagcactgagaatgcaaagataaataagatttagcccctgcctgcaggtgctcacactctattcagtaaagctcaaatttggaacagagggaggaataaggatataatggatgtatgaagacattcacataacattttctgcagatatttttgacacattttcctgtgtgtgattgcctgagagctttctcagctatataaatgatacctaccatgagttcctattgtgaatagatttcatatccctcatttatgtgtcaatgaaataatttttctgtctctatggatttgactattctgaacatatcatacaaatggaatatgtggccttttgtgtctggctgttgccacttagcataaaattttcaaggttcacctatgcattcctttttctggctgtataatattccattgtatagacatactacactttgtctattcatgtatcaatttatggacattggtggtgttttcactctttggctattacgaataattctgctaggaacatttgtgtacaggtttttgcatgagcatgttttcagtgctcttaggtgtatacctaggagtggaattgcggggtcatatggaaattctatatttaacttttcaaggaattgccaaattgttctccacaggggctgtgtcattttacattcccactagttatgtattatagttccattttctctacatcctcaccattttccttttttttaaatagccatcataatgagtgtgaattagtatctcatagtggttttgatttgcacttccctaatgattaatgatgttgagcgtcttttcacgtgcttattggtcaattgttttgaggttttttggaaaaatacctacccatattctttgccctttttaaaagtaggttatttgccttttgtattgttggcttccaagagttctttgtatgttctagatactagacctttatcagacatatgatttcaaaattttttaatgtggactgtcttttcacatatttgatattgtcctttgatgcacagaagtttttacttgtgataaagtcaaatttatttatttttttatttagttacttgtgattttctattcttttataacacatttttattgaagtaagatgctgtttatattttaaattcttctttgctataatattgtatttaattacaaaaattatttatcagtctcaatttacttctgatccatttggagtgccaaataacagccaaagcaattgtagttataaattaaaggacacaattcagcaaggaaaaataaattaaaagaaaacaaaagcatattattcttttacttttgccattaaacaacaaaaacatttctgataatttgtcaaatatttgtcaaattgtctcccagttatctgtaatgtagatagccttcctggtaacctgtcttaaaaataaatgatgtattcgtttcctgtggctgctacaacaaattaccacaaacttagtggcttaaaacaacacaaatttctcctcctacagttctgtagttcagaagtctgaaatgggtcttgctgggctaaaacaagatgtcagcagacctttgatcctttctggaggctctaggggacaatctgtttcccagcgttttccagcctctaggccacccacatttcttggcttttggttcttctcctctatcttggaagccagcaatgttgggccaagtatttgtcatattacatcactctcacttcctcttctgcctccctctttgacttttaaggacccttctgattacattgggcccacctggatagtccaggatactctccctattttaaggtcagctgattaggaaacttaatttcatctgcaaccttaattccccatgtgccatgtaacatatatattcacgggttccagggattagaaggtagacatctttgggcagctcttattctgtgtaccacaggtgactttactggtgtcctgttgtactgaagctagggactgcagtacatctgttgacaaatgatgaatttgaaagtactcaaaaagagagagagactataggtaactttgttcttgcctttacaaccctttttggataggagcacagaccataaaggcagggaaattagcagatatgcatgttattgattcctgattataatggctaaactagacgtttctgtttttccaatactagaagaaagcagcttagaaatttggcattatggatagcagtcttaaaactccttttcttaaaatggagcttacggacaggggctttctgtaaaggcagcatgtacagtagagtgagcagaggctttggagttaaggggaccagggaacaggtttcagctcatccaccgtattagaaaagtccaatattgagatacagaattcaaccacatccccccaaaattagattttcatgaataggtacaaaactttatgtagtagcatatctcgaatatctctaacacacagattgaaacttttttaaaatgagaaaaattagtgcttaaaatgtctaaagtagtttaaagacatttagttatgctgtttactaaatggtaatggctttaggaacacatgttagatgcatgaatttaaaaatcaatttgttcatgtgatgctggaaataaaaggattctccctatccagtgctgttagaagccaccactaagacgatgacagtgaattctgttaggccttttccttgattaaaaggaaagtgagacagcagacaggctgacttgtttactgctaagcttcctatcctggctctcctgcccacattttcttttctaagtcatctattgccacatgtagacagaagggggaaaagactctaatctaaaaatgaatagagtagcatgtcagtgctcccggtgatgtacataaaaacctgaatttttctgtttctatgtgcatcaggctgtctcttgccctaggttgtctggattgtaaaaactaagattattattaaagagggcagcaagccatttaggaagtgccctgtctccctgtgacaaaagctttgcagctaagcacagtaatttatgttgataaattgcagctgtcagagtgttcacagtgcttcatgggatatgtttctaactttgcatttcttgttcatgcattccaatatatggacttctctttaaaaaataaaataccagagcaagtcttcggaagtattccctaaattgtcacgacctagtttggataagattaaactaaggtaaaaatgataataagataataagaatgattattatgagtgtattttttttttcttttcaaagtctgtaaggatcttaaggtggaaagaaatgttagagaaactggccattatttgaaagacttaagtttccaaggaaagaaaacaaaatgtcagtaaagtggaaaaattggttccaaagcacagggaaatacatacatattaacaaaacaggccaggcacagtggctcacgcctgtaatcccagcactttgggaggccaagacagttggatcacttgagctcaggagttcaagaccagcctggacaacatggcaaaactccatctctacaaaaattagctgggtgtggtggtgcacacctatagtcccagctaccccggaggctgaggtgggaggatcacttgagcccagcagtgagccgagactgtgccactggactgtagcctgggcaacaggccaaaactctgtctcaaaaaaacaaagaagaaaaacaaaacaaaacaaaaaatggaaaggcaaggtagttaaaaggttactgaaaaaggcaatggaaagggcacaaaaatagaacagattaagttctacatatgacggtgtcatgcctagtgcaacaggaaaaaaaagtgatagataaaatctacattcaaataagagcctccaagcctcagttctaatccctgttttgccactgtatccattagctgttgctacaaagatactgtgtttcatacttcctcaaagctctgtggtccataacagtcatttacttgactgcagggcagtgcaggtaagatttggttcatctaaagctgaacttctgtacacagcacctggtgcgtcattgctctgcctcttaaaatagatgtttgggtgtctgactggccatgctctttaagtctctgtttggacttggagctaacttcttctcaaggcagtggcaaacacttaagacagcaagcagaaacatacaaagtccccaaaggcctggcttctgacctggcaatctatcctctttggtcatatacccaaatcagtcatatggccggccccacatcaagagacagaggagtacacgctgctcacaaagagaactcctgagaaattggacctaacgttgtacctaagaaagcctccacgaaagaaggataatatagttaaattgatattcttatttaagtgaaattcttgaaactctaggtcttcaataaacttcaataataatgcatcagaaatctcaaccgaaggaatggatattctagcttttaccctctacactccattccctaatttttatactcaaaaagtgatcaacttgtggaaaccacattacttttattcttttcttaaatttgtcagctttcacatatagctgtagatatttgaaaatatttgttggagacatgagtgaatcaagctatcttagtcacaagagctgagctcagtgctttcccaaccaagagctcccaaactgaaccattaacaccagctagacatttccaaggtatcagtctcacttgagcagttgacttcatcaaccaacataaatagttaaatgctttcaaaaaaaaaatttaaagtctgggttttcactagcaaaggattagtagttatcatcttagtagggcaacagcctattgaatgctcgatgcaaaaagcattttatttcaattcctactagtatgctgtatcatatttgttgaatattcccaaaatattgtttaatccaaccactccttataaaaatgttatgcagtgactctctactgcttaatagtctagaattcaaagacttctttatctggttctttctatcctcatcaatcttgtctcttgaaagacagtgccactttacaggatcatcagtattcgtggtgacatttgaatgcatgttgtggaatactactttaatgggaaaagtttacaaagctattggtggagcatctcttctccctgtatttcaacatccaagaatacacatttttcacagaaagcagttagtagtacacagtaaatagcaattgctttaaaatgagtaacttttagtaggttttagggaaagactagaatagccagaggcaagaaaaaaaattgggaagattacatatgtgacagtcagatgtatagacaaacttgagtaagtcaccgttgcttacgataaactttggttccaatcctcaaattcaaaagtagattgaaaaagaatgtattacccataattgcaaaaggtggtattctcatctagactaagtcatggaggccgtacatgataaaggacttggtaactgctaatatttatgcaaatatatttgaaggtggtatgattaatgattctttatgtaaatgtcactaacttgtaatgtgtgtttattcattaaatcttatattatctaaagaaaaaggatttgtatagcaggataaacaataggtcatttaaactatttggataaacaaattatctgaaagaattttagggcacatttactttcttaaatttattgataattattcaaattaatttgttatagctttctgtagctcagctccacataccaaaaattggtattcacttatttttctctgtttttaaatcccaaaccatgttctgactaaacattttgtattttcagtactgaataattaagaattattagtaatgagattcaggtcatttgggctaagatgcattgtggctgtgcctgtgcatgcaacctgatttgaattatctattttgactccttagattcctttttctgagttgatttggttggatggactaactggacttgtcaagataatctaaatcaatttgtgcacatatcacaaacgatcaaatttgtttagctaaaacatttctgttggtgacacgaagatgatagagatttggttcatgttgcattggattcacctctccttctcccactgaagtttttctggctgcggtcttaaataatggaaaaattagagagatgaaatggggcttggaaagtgaatagggttgattgcttggttgtggatttgtgttattttgtgattatttttaatgcctttctagacaagcctgcaaacttctacagggtattcaagggtagttgctaatttctgggtttctttcatgagaagtggtagaaatataagctgttaccaatactaatttctgaggccccagggaattgccccatccaggcagtctggcctagtgctccccacaactatgggagctaaatggccaactcccttgtacgtttgtacagacataaagatcttagggtttgtgtttcactaccttgtggcaagcaccctgcctaaataggtggccttgatttttcttctctgttattgctctaatgactcctaacattgattgagagggcgataaaatcctcctgcgaagtagaacttgaaatgacagtcctccatcaggagtattgggataatgtcagataaattactgccgatcccatgcgctgaaaaaaaaggtaatatctgagtgtttttttttcttcaccaccaagaaataaaaagatcttcagaattgtcatctagcctaaactttgagtcacagtgttaacttttgttttagtttgagtcaagtgccttttcttagagaaattatatcatattaggatgacattagagcagccatgtggataaaattctagtctttttcccggttcagttgtaataacgtttgcaagagaaggtggttgaatttgctgccatccttagcatcagactatatacaaggataataacatatcactgctgcaatctgagtatctacagttcaagtggaaagaaaagacatacaaatataaataattcaaagtaacatatataaaaatagttttcaagcagctcaatgtttcagcatactcattgtcattcaaacagacttggggtagggatgaggggtaacagaggatatacttttctctatcctacaaaattggaacacacaggaaaatagacagaaatatgaaattaaatgatcataatttgcccaaaatcttctgacccaaagacaactactgctagtattttggtgtttagtccagtcttttttctctatatatgttagatttcttagagaagaaactcctatttttaatttcataacgtttaagtttgtgttcttggcttttctttgttgttttgtttttaaggagcataattattcagcaggtatttactatgcattcctttgtggcagacatgatgtcaggtactgagggtctagggggaggctgctgctgaggaagccaagactccagcagactgtcacctgctcctgagcccacagtctactgcaggcctcagcctatcaacagggaagctttctctgctcagtacattttttaactcaaatatatgaggctttacattttccagttaaacattctcctgttactttttaaaaatatataacagctttattaagacataattcagaaaccataaaattatttcttttaaagtgtacaatacttgaatcttgattctttgtttagtttctctctcctagtacttttttttttttaagttccagggtacatgtacaggatgtgcaggcttgttacataggtaaatgtgtgccatggtggtttgctgcacctatcaactcatcacctaggtaggaagcccagcatgcgttagctgtttttcttgatgctctccctacccccgaccctccccagtgtttttctattgaagatcagattaactttactggtgttcttccgagacagtgataggtagttgaatgaggtagtctaaggacagactcttgccccattcaaggccattccaaagagccactaacgagtactctttaggaaaggtatttgatatctcaaaattcatatgtctgtataatcatttagcccatacttcaccgtgttattcttggtaatatacaaaatagtctctgaaaggcatatcatcactcgagagtaatagctggaaattattttcagtaatctgagttgaggaaacagaactttatttatttttgagatggagtcttgctctgtcacccaggctggagtgcagtggtgcaatctcggcccactgcaacctccttggctcactgcaacctctgcctcccaggttcaagcaattctctgcctcagcctcccgagtagctgggattacaggcacctgccaccatgcccggctaattttttgtgtgtttttagtagagatggggtttcataatcttggccaggatggtcttgaactcctgacctcatgatccacccgcctcagcctcccaaagtgctgggattacagatgtgagccaccgtgcctggccgagtaaacagaactttaatatcatatcacgtatcttgagttcaacttccagtgtacaacacgtgagatcattttctgtgatggagaatgtgagtgccaagtaagtgtcctggagttgatgtcacagcatcttcttcaggcagaaatcaacgcctttgcttccagcatagctttgaagcccctttttgttattgaatttggcacattttgatactttgaccttccagatctttagctttcctgtttttcccatcttttaacatattcacttgaactaaggaaacccttccatttctattttccaatggtgagcccgtcctcagagttctgactatgtaatagcaatatttcatctgttataaaatgtagaaccctgttgtttggaattttaacatgctctttgttggtaatagaggacctcattggttgggagtgctctgagctagccttcatgagaatgccagaatatcctcatgacctcattgtgacaaccagaaatatatcacatccatctatgttacctgcattttatagtttatctgggtgatttttttctttaacttccaaatttgatttttaagcctcttttatgtagtttacaggtttcttgccaaatattttacttgtattgcatttcaagccagaaacccaactgagtctgcacttagtgaactctttgtttcctatgtagtctctttttgcatcttgcattccagcataattatcttttcttaaaggcaacatcattaaagtaacgcagtgtccatgcatcctgttgtatctctgttcttacactaaggaaagatgtctcctagttggtaaaaaagtttttaataggatatgttggcaaactggcagctaccttctggggattttttcctatgcatttaccaatatttaggcataatgagaaatagatactaatgcttttattttagtagagatttttgaggagctcagaaaattacatgagtactgttatagtgtagtataaatacagtatctcacttcaattttctcccttggctcagttcccaaaaattaaagggagttcctttccttataatttgtgttaacaacctattgttcctccagctgtctttagctcctctttccagcataaattgattccagtgggagagaaggcaagatagtaaatcagtgcatctatgcttttacttccccttttgttctgttcaactctataattatacttcatttttgtaaagcagcagattttcaaatttaaatctcatgaatttcaatatttatacatgtacgtaataggaaaaaggacttaactgctctccctctcaattcacacctacaaactaatatttgctataataagataaaggcaaatccttttctgaaaaaggtgatagggattaccaagtaacattgtctataattttaccttttcagaaatggatgagtgaacatttttgagaaagaggaagtaaaaatatttttttcttattcttccctacagttagtatgacgaggtaaagccctctagaggccttcagatctaggaaaaatgcccctacctgctttaaagccccagctaggccacagttaccagcaaaaataattatttgggcatcactgttatgacctctctgggcacatttaatcagtcagtatttatggagtatatttcatgtgccaggcactggtttaggtggtagaaaaatgataatactcaacatatattgaactctttttcttataccaggaaatctgctaaggatttttcaggatactttcctatctaatactattattatttcagagggaagaagcaaggatgaatcttaggtggcagaacagatgtctgtccttcagggggagatttaacctctgtgagctccagtttccaaatatgaatcacattaataatacctactttatcaggttgttgtaatagatgacgtaattcaggtaaagctataagccaatgcagaactatttttaaaattaggaaatccagagaagtgaggctctactccatatcagtcacagttgtaggcactgagaatacacattgcactgagggaaaatgaagtcactgatgatcttagtagttttagtgcagtaatagaggtggaacctacactgcagcaggttatgaaatgaatggaaattgaagggtagataagtaattccagtgtttgggctctgaagtggggaagagagagagattgataactgaaagggacttggagtgggagagagagtaaaatggaacagccttgaacacatctaagtgttcatagaaataaataagatgatgagaactgtttgaaggaacaggagagagtgatgataatctgtagatcaaagctgtgagacagtaagggaagtgagatccagaaccctggacagaggagatgtctacatttctattacaaccacaagaagggaggaattgactggatgaggctgtagatactggcgtgaatgctgagaagatgtggagcaagttcttattgggcttgttttccctgagaagatggggtaaagtcatatgctcaaagtagataggcattaggcatttggaaaggtaggaggttttagtgtgtaggtttttaaatagtagctagcaagaacttaataattaactaggaaagcagaaagattgacccaactgtggatctagatgaagctgagtgcactctctgtatccttttttatacgcacagtggtgataaataaagacaaaccaaaagagaataaatcaaggctatttattcagtttcttgcagagtaactcatttcagcggagattcaaaggcagggaaagaaatgggaatgctgtgtagtggagaaagggatggcttctgatgtaccctaattggagtctgttggcccaaagaagctgcaggcaggctgactggaagcaagcatcctacgcgataggttagaggagcatatttggctttctctggttggtgctaaagttagcagtggagccaaaaattagggaagttgtcagctttcagttaagtcatggccatttggggcaaattgttgcagaaattattgtttggttttctgtgttctgaatccctgcaagtctgacttatcgtgggctgatttcccaggctagttgttgtagataagggattggtttcctgggcacgtttctacagttttggggtcagaattctattttttatatgatcttgccattgtccatttggcaagatcatataaaattgtccagataaagtttcctaccacttttattattattattgaaacttgaaatgaccttctgtttagaaacccttgttcctttagttaaaagaatatagaatctgagagacagatgagactcaggaaataatcagtaatggaatggaagtaagggaatttgtgggaataccattcaagaaattaacatgtaattttaacctgcgcagtaaaggaaaaatttaagaaactgcatcaccttgttttgagccttggtcaaggtaaacccaagctatgtgatatggtttggctctgtgtccccatccaaatctcctgtaaatttgtaaccccacgtatcaggggaggggcctggtgggaggtgattgaatcatgggggcgaacttcccccttagtgttctccacatagagttctcacaagatctggttgtttgaaagtgtgtagcacttccccctttgttctctctgttactgccatgtgacaaaggtgcttgcttcccgtttgcccttctgccatgattgtacatttcctgaggcctcccagccatgtttcctatatatcctgcagaactttgagtcaattaaacctcttttctttataaactacccagtctcaggtagttctttatagcaatgtgagaatggaccaatatacttgaaagtggaacttcaggccagatctctcagaccaatggactagaagatagagacttaagaaataagtgacttgcttgggcttggacttgaacccagtgctcattcattttcattgacctgagaagtaaccattacatcaatcatgttgaaaatttctttatcaaatttggaattggaaagtttgagtaatgcaaaacatcgacctaaacgcttcattaattactccacagagctgtctaaaaccataataaacttacctgttgttcattgtagctgtttacaggcttaagaaagtttaaggagaatgtaaccttataaatgtttaaccataagggatgataaatgttaggattaatggtatgtcagagtgtgcatatttttaggattctatgttgagattggagaaattcccgttactataaaatatttgaggggcaatttacctgataagagaaacaagggtgtattaccattgattgattatatagtaaacccttaccttgtctctcttcacataatgaatttcttttttccttacagcctgataagaaaatttaatgggatgcttccatcagtaataaaaccactgagccatatagaaagtggtttttgcatctttcccaaagtgtgggaaataccttgatatcagctggaaagagtcattacttccacattaaagttgtgctaaagtgaaagcttaacaagcacttagtttatcagaaacacagtagcattttccaaagctccatccatggatgcattgtattctaagggtgagaggtaatctgaagttgctcatgatctcaaagggcagggagacctatgaaaagggaacaagtgggaaacaaggatctagccattgaacccagtgttccttttccccccagtgcttctgaacacacccatataaggtgccctagaagcaatattaaataattctggaaagcctgggagtggtgtgcttcaatcagcaatcaccagttaaggaaatgctgagttctaggaaaggggcctcctttgaagtcatttagagacccttgaccagggagcttagggagaataaataccaaaggagtttgggtttttttatgtcttggctgtctgggtgaattatctgagatgtagacccagggcctggatgaaggtttgcagagcagacatctttatttggatacacacttattcattcaataaatatttacagtaagtctgctatgtagtaattgtaatctataattaggatattttctttgagtatgctaaatatacaggaataatagagaacagagcaaacctggtctctcctgggctcacatgattctgagtaatgaacaaactgtagcaataatactcaatattaatacttttgtttaatgtaataactagggtgctacctttatggaattctctgtttttaatggaatttctcaaattggcatactgttttctactaattgagaacaccccttgcataactgtaacatagccttcattgttttttgtttttttaatctctaaacaaaatgttttatttggtagaacagaattgcagttgccctcattctttttaatacagttctttactaataacaccaaggccctaattttgcacacacacactgaacccttaattctgcctaggagccctgctggtagttgttataatgccaaagtcttgaactatggaacttggcaaatctgttaccataatgaattagtaccaaaatgattggggtagcacattttagcattcttattgaatgcttgcttattccaatgtttcttacctttattaaacccatgaatcttttttttcttttttactaaacgtaagatcacacgtaatatcagaatgttcacaataaatttcgtacttagaaagtaacacaattataattttaggattttttttcaaactatatatacaactccctactcttaagaattactcttgtacataataaagcatttgaatgtctttgtagattatagaaacttggcctttttcatcgtatttacaaagtgttaaaacatttccagggagtagaaagggacagagatttcaagcatcctaaaatggcaattaaagcaccaagtagaaattttctgtagtctttgaaaatgagacaggattttaaaatgtaatatttttctttctcatggtaattattatcatctcttaagcctcaaatgtcataaattagctatactggaggaacctaggcctgaagttagtctgttacttttctattttcttattatcctcttaactattttccaggctgagtaaattctttgtacactggatttgtggctaaatcaaaacagaaagtagatccttctatctttgcattttagaaatgagtaacacatatcacataccagagtgtatcttttgcaattattcacaagcaacatgtttgaaggttgaaccacatacagtcaattgtactgttaaaaatttaatgcttttgcctgcagaatgtgccagtatattaattcagtggtgccttaaagttttgcatttgagagtcatgagcttacatcactaagcctggtagatatctgtctaataaggttcaatatgtttaatatatgagcctcttttttaaaagagtaaagataactttttactttgattttatagatttttttcgtgagatataaaatcatttatataagcaacgtcatctcatgctaaaacacagcactattcttgcattgcacattaaaagacccatataagactactgtttaaaaaagcagtctgaatttgtagcacagttttttgtttgttttgttttgtttgagatggagtctcattctgtcacccaggctagagtgtgtggcacagtttttcaagaatctattcctctttgattcagatattataaatactagggcaacagcagaagataaagactgcttaaatggcaaatctagtaaataaaagtcattagtatgttgaagtatatttaaatcttgactcaagaagagatcagtcactctccagtgaagtgcctgggaggatacaaggaagaaagtacagcaggccctataccagaggcagggctgtgtccagatgcctgaaatcatgccaagaatctggaggttcctcatccctgttgccatgtacacatataaacatatctcttagatgagaaggaaagaaacaatctgctgagatgatttcttcatccctcaacagggaaatgaaatatgggataggttgtgtatgcctttggatttctttggaaggaaaagacctctatggaataagggccaaaatagatagtgtcagtcctgttaatgcttagaacaaaaatacctacaacacctcagcaccaatccacaggcctgcagcatgtcctgtaggagatgcctctttgactcagagaagaggagacacacatcactgccactccatcaatgagtggaaaatgagataccccagcactaacagaatgaagcctcagaggctcacagccagtactcataagtgaagctgccccaagcctaagatcagaggcagctgttactccagacacatcagatggcctcaagtgcccaagtagaggccagtctgtagttacctccaagcaaagtatagaacagtgagacatcacaactatgtccatcatctctggaggaagaggttcaccaacactcagcaggcacaacactaaaaaggcatattggtaattattcatcacatttctccgatggcgctgatgttttaggaagaataagggggaggatatctgctttcctagattgctttttgcaaagagtgtcatggattaagaagaaaggtgagaggtcaaaatggtagccatcaagagggttccacccaatattgattggaccacaatgagtaggtaagatcctggtcatcaacaaggtgccacaagggtctgaatcagaggttgccccgaaacccccaacaactagataccactgatggcatcaaaggaacagggaggagccagggttctttcatgccttccaggctagatacttgcaaggaatatatgggattgtttatttcttaattaagaatacagaaaagctatctcaggccatttctacacatacatactagttgtgatttgacaggctttttaaaaaattagttcaattttagtagactttctaccaaattgattagagttgtaaatttgtctatacataccaagtaaatatgacttcctaacctgcagctttgatataatataatcttagtttgtacaaacttcataactcagcttttgaggaatgatttttttagtacaaaaacaaaattgccactctccatccctgtctccaaatacttcaaaatgaatgttttttctacatagaaggtttgtaatcatcttatctttggtgtaattgatgtctgatatattgatattctttcagttgcaaatacagccatttataacaagtgaatttttttcttctctaacaatataggtctattttcctaaatcataaataaaggctctgtagttagcctttcttctaataatcttgccatatcagcagtgaaagtggattaactgaaatttcacctttaatttttatctaatgtgtttactacagatacagcaaaatgtttttactaaaagccaaatattgaaccatgtcttagcagctaagcctgtgtgaccatttcctcattcctccttgtctagactgttaatactacttaattaaataatggctgacacaacaaaagaaacacttctatagatagtggtttataaatggaattggtgcattttctaaataagaaaatgcagtacagagtgtttcagttaagtacattgtgtcctgtggtctgtagcttacacaaaaatcaaggatgagaaacttctgaatccattttgccaccggcttgaagcctgtgactttagtcaatctacatgaatcactaagctttaggaaaaaataggtaacatagccacatgttcaagcaattcagatattcagtatgtagttttaatcatttaactttgcttagctaatccaaaaatacttctgaggagccaaccaatttgttaaagcccgtaatttgactttgggtttttaaaatttattatttttttatatatatagagatggggtctcactatgttgccaggctggcctcaaactcccggcctcaagtgatcctcccacctcagcctccaaagtgctaggattatagacaggaggcactgtggctggcccatagtttgattttgttataagagagaatacactgagctacaagtcaacagacttgaatttcagtgctgggcatcctaggtcaataaggtatctttaattcgtttccctgtcttgaaataaagtgtttggatattatatcagtggctctttaaatacattctctgaagtactgaagacctagccagttccctaaggccaacttggtttggttatgaggtaaagtcaagtgaagagaactttgagcctagcactttaaattggttaaagtaggagcagcctcacttttatctgtattaaaccactgaactaaataatagataaggtttcttgcagattagacattctataataaaggaagttagaccaagtcatatttctgcccacaaggagcttataatctaattggtagaaaaaaatacttgaacatttaatgtgtaagatagtgttacacatgtcagcactccacaatgatatagtaaaatgctaagtagaaggttataaatttgaggctgggataatatgcaactttgcatgcagatagttaatgcaaagaaggttcatcaaaaaaagagaagttcagcctgtcatcaggaaaaagtccatggtatgagtattaaaaaattgattattataacgagaacgagaaagagaatatattaattgtgaattaaagtagcttgtttctaagaatggctaatattttcagacttgttagaatattcatataagaagatgacagctattcctaaattgaaataatgttattgtatatcagcaaggggaaattaaaaatgaaaataggtcatgatgaaatatattaggagcaagcttgtatatttataggtttatggacaaagtctaagacattgcttcattacctttgctataacaaatcatatctgttaatattagaccatctgaacttaaatcaaatgatgttttccccaaaaggcagcggtcagactctcactaaatgaaattctattctaaaaacagccatatgattgaatggattctgcttgatggtaaacactcatcccctatttctgtgttgtaaatatttttccacaagacaatgaaaagccaccatgaccactgagatttcattttcgggactgtcacagtttcaggctgagatataagaaagaaccatctattattaaaggagcagaggtcaagtcatgccggtggccctcgtagggtaaagcaggggtcggggaggggctggtgcaggagggtggcaggagatctggaggagctagagtggcaggtactcactgtaacagggaatctcgagtgggcagtggagccaaagaggaaagcagggcaccgcgtagggacacaggcagcagggaagatgcctttgtgagaggagcgggaatttcaccagcaagaggtggcctgagtggaccagttggtctggctgaattgatcaagattgagccagaatcttagagggatttacatggcaaatctttcagaacttcaagggctttctgtaaattcaaggattcagtcatctggttaatttgactagatcttcccaagcacaaataaatggaaaattgacttctaatagtacctaaccttcactccgatatttccggcttttgaactttaccaaaggtaacctcccaggtgctcagcgaaaggaaaatttaagatagtacatgaaggagaagagactagacaaggtcatgcagaaattaaatgaaaaggcttttatttcacaagcagggaatcgaaaccagaccaccagtaagaaagggcaaagccttagcaactgagctacagcatagggcagtcttcactgttcttcccagaaagcatctagaatagttaattgtgagcttacacaggcttttaactactcaagataatttttagagctaattatgacataaaccctaaaattcctgttccctggaaggaggagaccaagagaaagtactgccacgtggtaacaaggtcaagctcccaaggacataaaacaagatggagataaacagtgatttttaccattcagtcaaccatttgcacagaaagagagaagccagaagtctgactggtaagaaattcttacccttttgccggcatgccaggcttctgggttctctttgcctgagcggcctccatgactgagcttgccacaccatcgcgctggggcaaagccacatcagaaaagaaaattatctttttctgttctggccagagtaaaatacatgtgacaaaaacatagacattagctgctctgattagcacccagtatcaaactggcaaggctcaaatttgcacctggttgggctccatcatcattaatccaacctccaaccaggagtttcaacctgtggtctctgggcaagatggttgccctgagtaatagaaaagataagaaagagaaaggagaaagagaaaagcattgcctgaggcagggtggggaaggtgaaatgatctgggaggccagagaaagacccacccattgcagcgacactgaaaaaaaagttcaggcggctgcttctaggtagcgaagggatcttttccagcaggcccatcatctctcaagtttccccttttagggaggaaaaagctccccatgtcccacgatcctgtacatgcctaatcctgtcacccacagttgtcagcaaagagtgcaaggcagattattccaaagagaatagcagttgacatgctgtagtgccaaacccattcttagacaaaagggactttacttagagccctcattttaaaaatgtacttcaaatgcattgttgttcattcggaacattccactgtgttatctttagtaacattttgctgtttctgtaagacttcgctgcctcccaggcctgaagtgtaagccagaaagaactcagttttccagaaactaaggatcccatttttacctaaaatattggccttacgctcagcttctcttgattaacttagccagtgatttttttttcctacccaagtgtaagaaaaatgaaacaaaggggtataacacaaaaatctgatttttcaaaagccaaattttataactcctgcaatattactgcttactaccagttcctttctgacccagtcagatgtaagaggcttctaactggatccaagccagttaattcccagatcaaatccattcctgtacccagtccagtttctgtcacaactccaaacccagtttggatcagaaatttgctcaaagaaactcagagagctcaaaacacaaatctgtggagctgggaaatccaagagggagcttaaccatgatccccagtggctgtgagagatcagtggagctcggaaatccaagagggagcttacccatgatccccagtggctgtgagagatcagcggagctccgaaatccaagaaggagcttacccatgatccccagcagctctaagagatgagtggacacaagtgggtcctgcaggtaccttgcatattcactcagcactgctgggggatgctagaagctccattttggatcccacttctgacaccatctgataaaagaaaaacttcagccgaattaaatttaaaagagttcaattgagcagtgaacgatttgcaaatccggcagcccccagaatcacagcagattcacagagaccctcttgactggtaaattctaaaagggcctggattatgtctctttagcttatttgtataaataccacctgcaggtttgagattgatgttaagtaatcataccatgctactgcacatgttcctctcttttttcacttttctatgacatttctgtttgtttgatgtacctgtaataatctctgttgacatttgaaggatagaagcaaatgccactttaaagcttcctcagtgcagatgaaatgatgataataatacaacacattttcaacacttttctggagaagtcaaagctcttcacagacattaactcattcatcttcacgatagcagtattagaggtaactggggacaagtattattggcattttacaaatggatgctgaggtcacctgagggacttttaacaaaagtcataaaatattacagtgaaaagatcaactctctgttttcagggatggcactgaggcccagcagtacaaaatgacttgccttgctctacagccgggcagcaagagattaggatggctgcgactcagtcatctttggcatctgcaggtcataattctcacccctgtgggatggttttggggcaggccagtgtccacaggaggcaacaccaagacacaggatttgaaggcaacagagcaaaataaatcagttcagaacagcctgtggacagcctttctctttgaacaaacgtttaaatctgatactgattttccacactgaaaattttcacagagttctacacagttcattcactttaccactaataattaatgcaaaaaggtcacattttgtggatttggactgtggttcttattttataagcccagtaagcttttcttttttcttaaagcagctctgattggctctttaactggaacatggggccttttatgagtagaacatgctgatgacataatacattagggaattctctttaacaaataaaaataacgattttgtttattttagaaagggctaaatgtttgaaactgatgatctttgtaaacattttctaactggcataattagttttgattcctccaagcagcagcattttcctggcctaattgtttttcgatcaacaggccgagtcataacacagaaaatgtggagaaggaagaataattgaacatcagaagccttctaatgcattccagtcctcatccaagggcaagggaaatgtgacttctgagagagaagaagataaatgcagccagtttcaaatagaattataatagcccttccttggacatttgagttcaaggaaggattagttgtcaggagagggaggtgatgagtgttcaccttgggaagagtcttagtagatcagggttttgagagataaggctcaaaaagaaagcacagctgatggcttgttatcagagacatgcataacaataagtcttgctcttaccattttcacaagcactaagaagttctggtagacactgcaagttaatttccagggcctcctgcatcaatgagtggaagtaaaggctgtccttggtgagcttcaatgagttgacaaaggaaggggcctcaccacacacagtctgtgtgctcagcatctctctctatacttttccaagaagctgcaatgcagatatatcatagactagataatttcttcctaaatttggcacactttttttcaacttggatttattttgatgcacgttaaatcaataaacatttcttaatgctttgcaatggcattacttcagctttcagggaaaccaaaggtgaaccaagagggaaacacttcccttcctaagttgctagcctttcttcccaaattttttccccaaattgtattgtggaattttaatgttgaataacttcaaacctacaaaaaaactgaagggacagtacagcaaaatctgtatacctttcactgagattcaccaagtgctaacattttttttctacatttgcatttatttctttgtatgtgtactaggccattcttgcattgctgaggctgggtaatttacaaagaaaagaggttgaattgggcttatggttctgcaggcggtacaggaagcatcatgtcagcatctgcttctgggaaggcctcgggaagcttttacccatggcagaaggcaaggcagaagcaggcactcaccacagggaaatcaggagcaagagagagattgtggggaaggtgccatgcacttttaaatgaccagatcttgagagaactcactatctcaaagacagcaccaagccacgagggatccaccctcataacccaaacacctcccaccaggcccttcctccagcatcagagattacaattcaacatgagatttgggcagggacaaatctccaaacaatataatatgtgagtatgagtgtatgtgcattacattctgaactatttgaaaataagttgaaggcatgataataataaacacctgaaattcctcagcttgtatctcctaggaacgaggtcattctcttgcataactacagtgctaatatctacccccaaaatgtaacattgatggaataatagtgtacagtccatatgcttactccccaagtgtcccagtagtgctctttataactttctaaaatctggagtctactaaaaaaacatgcattgtatttagttgtcatatctgtttagtctgtttttttttttttttttttttttgagacggagtctcgctctgtcgcccaggctggagtgcagtggcgcgatctcggctcactgcaagctccgcctcccgggttcacgccattctcctgcctcagcctcccgagtagctgggactacaggcgcccgctaccacgcccggctaattttttgtatttttagtagagacggggtttcaccgtgttagccaggatggtctcgatctcctgacctcgtgatccgcccgcctcggcctcccaaagtgctgggattacaggcgtgagccaccgcgcccagcctagtctgttttaatctagaaaagtcccttcacttttttggtctttcatgacactgacagcttttaagagttcaggcccactaacctgtcatctgcccccattctgcatttgtctacggtttccccatgattcaattcaggtcaggcatttttggccaaaagtattaatgggtgatattgtattcatccctagcatcatagcaggaggcacatgatatcagtatggccttttattggtgatgctaaggttgatcatttagctaagatcggactcatgagatcactctgctacctttttttcctttgaagttaaaagcaatacgtggagtactgctttggaactgggtgctatccttcttctccacattttatccagtagtttaagcatccatccattgatggttcttgcctaaactagttattacactggtggctgcaaatggtgcctttctaattctctaattctgccattccttcctttagtagttggcattcttctgtaaataataggttttcttctctccacctgcttttggcaattcattattcaatatattataatgcctctctctctcaggattcttttctaatgccccaaattagttccagtcgttgtgtccttttcacaggtctacatctgtttttgagcaccctcttgctttctggagcaagatgtttcaagctcactctgtactttgcctgcttgagacgaggcatctaaacagtcagctttaaatacaaagtgtgttccagggaagcaatcaagtcctttgtaaatagaaaagagaatttttaatttgtcctgtagcagttggagaatcaaagagcggtacagggtagcaagtgacattgagtttagacttgaaggataaaatatgcagagaaaagtcaatttgttctcggagggaacacgtcaaaaattttcgtagaagcaggaaattcccgatctattcaaggaacagcaagtagcagagagtggctggcaagcaggtaggaagtagccagataacaaagggccttaagtgccatgccaggatgtttgggccgggaagagggaatgtgtttgttttgaacatttcattataggcaattagggtcctccagttattctttcacaagtgttagaggagtgggaagagaaggtaataattgggagaaaagagtacaattagaagattatttgcaattattagaagaaaaattagaagattatttgcaggtacaattagaagattgtaagtatcttttttgtataatgacttcttttcctctgagtagatacccaatagtggaattggagatcattattctaagtgaagtaactcagaaatggaaaaccgaacatcatatgttctcacttataagtgggagccacactatgaggatacaaatgcataagaatgatacagtggactttggggacttgagggtcttgggggaaagggtgggaggtgagtgagggataaaagacttcaaattgggtacagtgtacactgtttgggtgttgggtacaccaaaatctcacagatcactactaaagaacttactcatgtaaccaaacaccacctgttccccaaaaacctatggaaataaatgaataaataaaataaaataaaaataaataactccctccccccttcaaaaaaaaggaagattatttgccacatgtccaagcaggcatttatttattctataccttatagaatgtagtatatattctcttggtaatttcacattaggtttgcttggattttggatttttggttgtcctttctacagttcctgctagatagttctcagccttcaagttgaagggcagaggactgagtctgtcttgctgctgaacacatgttaagtatttaagtgtttgttgatccactcacatcgtaagttcaaatcactcaaaatgattgtatatgcacactttgaatttaatgttctctttataacctcggactctgtgaccgcatagctacatatgaaatgaaaattactatctatataatcaaaccaaaaaataatgttcttctgaaaaaagcagataattgaatcataaatatagttcctgcttcaacaacctagaactgcactgttcaatctatatagtaaccactagctacgtatggccactgaatacttaaaatgagccttgtccaagttaagacatgctgtaaatggatttcagagacttagtatgaaaaaggaatgtaaaagaccccaaattttatatattgattatgttaaaatgattttggatatattgggctaaataaaaaagatattaacatttttcctatttttacttttttaaggtggctattagaaaatttagatttgtgatcacttatttttatttggcagtgctgagataaataaatatatttattttatagatggtctcaaacttgtattttctaagattctaatagaaatataagtacacaaaagacatgtactccacagctttacattaggactactttgagttttttacttcaagaaagtgaaaacacaacatattgattttatttttgaaaattttcaagagcaaccataagtataaatgccattttataagaaacaaattcactaataacccttcccagaattcatattttacagtataaattggcaatttttaaaatataatcttttgcctcatgtgtgtacataaaagacctttttttaaaaaatatatttgtcaaaaattaaaattgtaaagacctataatagtgaactgatgttacagacagtatagttttcttttcctggtaatgaaatctgagtcatattttcttaatgtgttgccatttctccacataggctaagaatcctcagagagtaaatggtgagtgtagacagtggtcccattatgttttaaatagttagtgatgtctaatatgtctaacttaactctccgaacttaacctaatgttccagaatggtagggagccttaagattcatcataatgggttcattaagcatttgtctatatgagatgtaaagtattcattaagtcttagagtgatttttaggctctcactaatgcatctccttaagtctccatcaggctgccaaaagacagctctgtacttcaggagaacagaccagcaacagttctcttctttagagctcttcaaagcatcgccttaacctcccttactaacttgttagtgtctgacaacttttattatcatcatagcctgtgattttagcctctctgagcttcattttcctcatctctaaatggaagataaaacctggctatgccttgagtggctggtgtactgtaaggactcagatcacgtcttgaatgaataaggattatgcccatctcaaatagcacctccattttgccctcaggatttattgattttagaaatgtttccattgcctttttaaataatgtatttatttttacaaaagaaccagcgtcgatctacagattcttgggaagccaggccagcgggcaggcctctagggatgccagtagccccccactgtcaaaggcttcacctccctcttgaatacacaacccatcttggctgccaggaaggcacctctgccctccttggcccacctcatgcttctctcctgtctgctgggtttgattgtatatctttcccttttactaaaatgtgagtcctcattttagtgagggcagagatactcatccttaaaccctagtgcctggcacagaatgaggctttaatatctattaaataaatgcatacatacatgcaggccaaggaatcacctgaaatgatgttaagtatttcacaaaagctagcctggaaaagttacgagtgtacctcattctacttctcagctggctataaactaatcacttgaattcaggcctttgctaattgttcagctcatgacatctctctttttgttaattttaaaagaaaaacctgatctgttttatcagcaggataacaggagaaagcaaagaagatggaaattacttgaatatgtatcatatgtaagattggccacataatccatacaacttccctgtgaagtagatactttctacatatttactgttgatgacacaaggccaaagagtttaaataactgagtttgtaaagctggtgaatggtagagccagggtttgaacctagatctaacttattaacttcatcatgatggagtcatgctctttgatagagagatgccttttctataaaagcacctgatcagaaaagtcatgcaggtacacagagaatgaatgcctcccactgttgcttttcagtgccaaaagcatccaaggccttgcagagtactccttcatgcttccagctccaaccaaggagccacagttcactaatgtagcttgtggaggaaagatgggcaagaaaccagggacaaatggccccactaactgaaaagagttgaataattggtttccaccgatttgccagctcttgctttgtagtcccctgtttttccagctttagagaaaagctgggaggacatcactgaaaacaatagaacacggagtgctaattctcgtccttacctttgggaaataaaacagcctgagataatggatgaaaattgtaaaatctatgttaatgtgtttatcacacaaaatatcgttgcttataagcttgcacatagatctgtaacttttatttttgccttttgttaaaaacgggtcttgatctgatgactggttgtctttgagcaactacggttggctgtagtctactctgcaaacaatggggggaaaaatccaagtcagattttctataattcagccagctaaagtgttggacaaatcctctagggtagaaacgaagaggtaatttgtttttctactatctgtacacagctgtctctttactagtttcatgtacttatgtcatgattggccttcagatatttggggtagaggaagttcatcataattccaaatattttccttaaaatttttttatttttctaaggttttgtccaaaaatatgattctgtgacttgaagaaaatatattccaaaataattgtaatgacatagtaaattaaaattcatgactttgtctctcaacttattcatcttagttttctatcatttttattgtactttccataaagttagagataatcaaaaccaattgttatctttaattaattgtaactatataactggtcttgttggaactttaaatattataaaataaaataaaaacataatttacaagtatggctaacagtggccttgcttaactcaaagaaatatttccttccaaaaaaaaatttcatcttcttatgcccaaataaaccactttgattattttcccatttgaaaattaattaggctacaacagtgtcttccaaacccagtatgtataatccaggtatttacccctgaaattctgaaatccatagtctggcttcaaaaatcagaaaggaatttatatgcagctataaacttgaagcacaattttgtactcctgttctttgggcctaagtaaaaactaggattttaatccattttctcgaatcatataatgtgtgtgtcaaatccaagtcggttgtgcatgcatgggtcttcacgagggagtttccactttaaagttggcaggcctgctgaagcactctaaattgccttcgcaatgaagtggtgtgaagtgctccctgattgcctccctcttggctattgggaaaaccttgaaaccgtaggcctgggataggtctcagtaagctacttggtaagcacccaggttccaggcaagaccactattcaggagaggtagagatttcaattgactttgctgtgaatccctcaaagatcaccaccctgatctaccaactatgtaacagtgtctagatcgatacatatttttgtgtatatcaccagtgttcagaaacatcatctcacagaagtcccaagtcccaaatgactcaagagttaagagcttcctatattgaagttcgtatcagggcaatattcacatgagattcactctgtattactgtgtagttttacttttgtgtttgcactagtaaaaacataaagaactatgaaaaataatttgagttttaataaataagctgtgtgaactggtaatactgacaatagattatcttgcagtactgttcctgaatttttaaattgccttttcaagatttcctcagaaagataggaggctccctctagtgggaagtgagcattgtaattgattgatttcccccaaagcagtgtgtataacttcataggtgttgtttgaaggaaaaggggcctcttctgactctgatagtttgggctccataacatttgttcatttttctctctgaattttggtaaagaaaataatattggttaccaagggatgcttataggacagctgtgagtttagagtcatgttgatgaagtgaattgctcctgtatcagcaaagagaggttgacgttaccaatctgtgcttaggcattaacttgttagaaaataaaaaatatatttatagctatatatttatgaaatgtataaatatatgaattctaatcttaattcataagccttttactttgataagtagtttaaaggattatcttatcatctcttgccttcactttatggctgagcttaagtgacttgctcaagattacacatttgaaagtcggctttgacctttgagtttctattaattttacagaatgtaagctgtattcactttggcttttcttactttatgagaaaacagtaaccaaaatcacatgcatttttttaggtaattttctatctgtctcatatcatttctacttgaagctaaaactacattctgtagagtgtaataacatattaaattttaattctgaattatcaagagaaactaaaattgtacccagggaaggaagtaagtagcacattacaaatacaggttttggttttataattagtaaagaaaaagaaaagattctaataaaatttaatattgagaatgatatataacccaaaatggtcaataaccaattccaggaagaatgtttacagcaagttatagaacttacccattttaaagccatacatcatatatttcacctatcccacatttatatatatttttatcaaagtgtgtacttgctttttggtaagtgacaaagttaatctacactggaggaagaaaaaaaatagttactaatttttttcccttattttcttacagcaaatgatgtgcttgcttttggaacattggtcagtacttccaatacctacgacgggtctggtgttgtgactgtggaaactgaccacccactcctctggaccatggccatcaaaagctaacctgttgactggcatccataagtgtgcctctgccttatctcatttctcaacagttcattgctcaacaagaacgattcacctgggtttgcaagaatctaaacctctctaggggaagcccactgggtttaaagatgttagtgtttagataatacaggtaacattataaatgacagatctcaattttatagtagtgggaaagatacatgctaagaaagcaaataagctctattatattcggttggaacctaatgggaatcattccactatacaattcagtactgattattcttcttacattattaatcattccatttatcctagaaaattgtttttaatttgaatcagagaaaactgttgaggttcctcttggagtctagaacatccttaaatgtctaacaacaagggctacctctgagtaccttttagtattagttttctgtatatgatatatattatcttatactgaaaaaaaattcctttcagattggggtgttagaagtgcaccaggtcactctgaccttattactgtctttggtattgtcttaaataaatcaagaatcattgacctaattgttaaatttaaaaataggtagttagcaataggtggaaagagaaatgatgtgaaagataaatgatgattcgtggagccctactcacacattaacccccaaattcaaaagtaagaatgcaaaagtctagagggggtaacagtctgcatcatcatcacaacctaaatggagaaagctgtgcagaggaaacttaagcataaaaattgaattcgtttctgacataccttagactgaaaaactgttggttcatccagaagtgtattcatattaccagaaaatgagtttgtctatggggatacatgaacttcatatactaaggagcctaactccaaagcctgcgttctcatcccagtctgatattcacctaagtttccggacccttttccttagctgtaaaatggaagcggttggactgatggtgtctgaggttctttcccacactgaaattctaaatattgacacttagcagtcatagggctgataatacacacagttactgacttagcctaaacaacctggtgcatcgaaatgtattcacctttcttttgtaaagagaccatcttctatcttctttccacctttctctgttttatgaaaccaactgttgacatacaaaccatgattgaaggagaacctgtccaacatgttttatgtacacaaatccctatgttgctataagaaaagtgaaagtaactgttttcttcttggtgctatgacagtgtgagactcaggttgtctgtagagaatgaaaggagcagtggcccgcgtgattgtggcatttaaggagcagtggcccatgtgactgtggcattttcggcacttttcattactttctgcttgaccggaagttgaggcttagctatgtttccatcttcagtttctgaagactagttatatattccttactagaaatatattcataatatataaaagaaatatatctgtgattttaaaattttgctaccaaagaatgcatgttctgtgtgccctgaaaatgttaccagtgttaataaatggatacttatcaaaaaagaa

SEQ ID NO: 239 - DNA, 106919 bp, Homo sapiens
  source 1..106919: mol_type = genomic DNA; note = NC_000019.10:50203622-50310540 MYH14 [organism=Homo sapiens] [GeneID=79784] [chromosome=19]
acgcccctctttctccccaggccgaagcctcgggacggccctggaagccggtgagtgcccggggccggcagccctccgggggcggcggaacgggactgagccaggggaagctggagcctgggggctgcgatcggggcccgggagcccgggcaggcggccggggacggcggggaggtgacgcggacactcaccttgggcgcgcagcgggacggcggcgagggaggtgggggggcgggacgtctacactcccccaactccagttgccgccgtgtgcgaggcccggtcggggtcctcgttgtcagccccgggcctgttccgcagaaggggaaactgaggctgtctttggaacctcggccgctttaatacctgagtcatcgcctccagtcccccgcccccagcatgacatgtctctgttctcacgtgtcagaatcggaggccagagagaggggtcgtgactggaagaggcggaggggtagggaaggacatatttgagaacctatgatgtacttggacgcttttattttttataactaaataatttcctttccttatcgtgttgactcgaggtgagttatattgtacccattatacagagaggggaaggctgagactgggccgaattggtgactgcagggggacctggtggagaagaacactccagagaccaactgtgtgctgggtcctttaaccttttcagtcccacaggagtcccctaaggaaagcggtggtccctgtggcatagatggggaagcaggttggtagtaatcaccaactgggacgcagaaattcatgtctttagggacctgctacaagttctttccagaccccctcctttagaatggcagaaaacggtataggcttgaattccagacctccctcttacgctgtgtgatcttgagtgccttactttgacccttcctgcctcagtttccacatcagagaaatggacatgctgatcacccctatgtcattggttgttgaggttattctaggccgggcgcagtggctcaggcctgtaatcccagcactttgggaggtggaagcgaaagaatcgcttgagcccaggagttcgagaccagcttgggcaacacagcgagacttcgtctctacaaaaagtaaaagagttagccgggcgtggtggcgtgaccctgctgtcccagctactcgggaggctgagcagggaggatcggttgagcccaggaggtcaaggctgcagtgagccatgatcgtggcattgcactccaagctgggcaacagagagagaccctgtctctccctctttttttttttttaaatcattttatgatctcaaagagctgttctaagaggagaaaatacccgacacatagtaggtactcttatcaccatgtagtctttatttcactcccgagactgaagctcaggacagaataccattgtcctcttctttggtactcttactgtctatagattttgttgttcccttcccgcagttgggaaactgaggctcagggagattaatgatgaagcactgggctggggaactttctgaacgtcgttttattaatttcactggccgcaatgcacagcagggaaagctgaggcccaggaagctccagcggggtttgaatcccgggaatcctcagccttctccgcggcgggccctcgacctttgccctccataagggggaggagcccctggcgccgccgccgccgccgcccacctggcaacaggctcaacccccgccttcccccggcccccgtcagaggccctgaagctccaggcccgccccgttcccagccgggcaggtgctgggtgacatcagagccgggctcccgccctgtgacgcgacggggccccgccctgcgctggaccgcggaggtcgctgcacctgaagagaacggggattcccgcgccctcaccccatctccccgctccggtcggcgcccccaggtagccccgaggatctgcgagttgagggggcggcgacacaggcgcttgggtccaggggaatgggtacggggctctcagactcctggatctgagaaggggccttgggggccggctgtcccaggtctgaggaaggactgcgccgcgagcccgaacttctgggtcctgggggaggaaaggactggggccaggactgcagagctggggtcttaggggaggagggggctgcaagcccggattctggggtctgtaggagcaggggctgggggcctgaactcctgggtctgagacaggagggcattgagtactgggactccggaaacccagcgctagaagccagggtcagacggctggatgccaagggccccaacctctgccccagggcggatccctggctgcttttctttttcaagcccagcagtctcggcccctcccagggcaggtgctttcacctgcccaggtgacagtaattagccctggcagagtgttcctgctggttgaggaagggtagggcagtcagagaggctcggccacttggagccaaggcctgcaggccctgcccgccccatcagggctgtgatccatcttcagaactcagcatcctcacctctagcccggctgcagtgaggtgagggggcctgcacttcccaatccataggaggagggggctgggggctcagactcctgggtcctgggagaggaggaggctgggagctcggactcctcagcctggggaaggaaagggctgggggcttggactcttggctccagggaggagaggcatagggcatagggtgattgcaaaaactccgaaacccttcctggtcaaaggccacagggctggtgaggaagtggatggggtggggtggggtgggtgggggtgagggtaaagtcccagggatggagtttgggtccggtgtatccaggtcacactggagatatggggtgagccttgacgatttgggggccacggggtggagaaactccctgctgccttcagagtgcaagggtccagcgtttgaggcctgagagcctcagggccaagagtcactggaagctggagctgctgggcttggggatgggaggagagggtctgggaggaagtgggtcctctcagcggagctgggattcccgtgggagaggcttgagggaaaggcaggagtctgttgggaccagatccaggggggcctccagggcagctgggcgtttagaaggacttctccaggggtatgtgggagcgaggtggggacggcagttgcatataggtctatcgggcagaggtgaagtcctgctgttggggagacagaaatctcccactgtttctgtgactgatgtggtggggcagtgatggggacatttgaggcagtggatgagagtaggggccgggcgtagtggctcatgtctgtaatcccagcactgtggaggccaaagcaggaggatcacttgagcccaggagtttgagatcagcctgggtaacatagggagaccctgtttctaccagaaaaaaaaaaaaaaaaaaaaaaaaaggctgggcctgatggtgcgcacctgtggtcccagctactgaggaggctgaagtgagaggatcacttgaacacaggagttgaggctgcagtgagctgtgattgtgccactgcactccaactccagcctgggcaatagagcgagacctatctctaagaaaaaagagagagagagagagagaaagagagagagagacagagagagagagagagagagagagagagagagagagagagagactaggggcagacttctttagcaggagggggccacgcagcaggatagggagaatatttttcctgcctggtgcttggaccgcgttggaattgccactactgcccatggcccgctggatggtgggaggggcctaacacattctagttcccccagcacctggttgcctccgagatagctggagctggatccacccctaggccaggagctcctccaggcagggctcccagcctactcttctctgggtcctcaggcccactcggggcggagtctcgtacttgaaagtcctcagagagttgaatgaatgggtccagtctccccattttatggagaaggagtcaggttccagagaaggaaggaattgttcactgaagcagtgagattcgagtctattctgcaggcatgagataggcgtgaccagaggtggtcagggaacctgaatgacaaaaatcaggtcaattcccaccctgggctcatatcttagagtaaaagcaaggttgtaccttttgtcccctctcttacatcccctcccaccctctgcccctcgatcatttggctctagccatgctgcctacctcacagtgacacagccacacagatgcattgtggccccaggacctttgcactgctgtctggaatgatttttctcccaacaacccccttcctcgctcctgtcatctcccttgggtcttcatttaaatgccacaccagagaggccctccctggccaccctaatgaaaacttcaacatcctcaaccctaacatttcctgtcccctggtttattcctccccttggtatttatcaccatttaatgtactatctggccgggcatggtggctcgtgcctgtaatcccagcactttgggaggcccaggcgggcggatcacctgaggttaggagtttgagaccagcctggccaacatggtgaaaccccatctctactaaaaatacaaaaattagccaggcatagaggcatgcgcctgtaatcccagctacttgggaggctgaggcaggagaatctcttgaaaccgggaggcagaggttgcagtgagccaagatcaagccactgcactccagcctgggtgacagagcaagactctgtctcaaaaaacaaaaacaaacaaacaaacaaacaaacaaacaaacaaaaaaacccaacaaacccaccaaacataccatatttggtttctgtaaaaaaataaaaaagagagagagaatttttaaaaaacaaaaaccatactatctaatttacatttttaatctttttatctgtctcctgggattacagcagctctgtcaaatagcaatataatacaggccagatgtgtaatgtaacattttctagtagccacatttaatgataaaagtaaaaaaggaacgggtaacattaatttaatgatatattttatttaacccagtagattgaaaatattatcatttcagcatgtcatcaaatatttaaaatctcagcaaactatctttttgttgtactaagtcttggaaatctggtgtgtatcttacacttagaactccagatggggatatttatatttaaattttaagatggggctcggtggctcacacctgtaatcccagtactttggggagccaaggcaggaggatcgcttgagcccaggagtttgagaccagtctgggcaacatagaagaccctgtctctacaaaacaaatttaaaaattagtaggcatggtggcatgcctgttaatacatttattttttaattaataaatttcagacatgaatcacctgaggctgggaagtcaaggatgtggtgagccgtggttgtaccactgcactccagcctgagcaacggagtgaaacctcatctcaaaataaaataaaatagattgaatttaaatgaatgaaattgaaaatgtgtttcctcagtgacacatgccacattgcaagtacccggtagtgcacaggtggtggtggcttctgcagtggacagcccggggctagaaagtaaacttttggaggcaggcgtcttcttccagcttgtctgttgctccattgtcagtgcccagaactgagcctggccaggagtggtggctcacgcctgcaatcccagcactttgggaggctgaagagggtggatcacctgaggtcaggagttcaagacctgcctggacaacatagtgagaccctaatttctacaaaaattgaaaataattggccaggcgcggtggctcacacctgtaatcccagcactttgggaggccgaggcgggcagatcaccaggtcaggggatcgagaccaacctggataacacagtgaaacgctgtctctactaaaaatagaaaacaatagccgggtatggtggcaggcgcctgtagtcccagctactcaggaggctgaggcaggagaatggcgtgaacccaggaggcggagcttgcagtgagccgagatcgtgccactgcactccagcctgggcgacacagtgagactccatctcaaaaaaaaaaaaaaaagaaaataattagccggggccgggtgtggtagctcatgcctataatcccagcactttgggaggccgaggcaggcagatcacctgaggtcaggagttcgagaccagcctggccaacatggtgaaaccctgtctctactaaaaatacaaaaattagctgggcgtggtggcagacgcctgtaatcccagctacttgggaggctgaggcaggagaatcacttgaaccctggatgccgaggttgcagtgagctgagatcacgccattgcactccagcctgggcaacaagcgagactccgtctcaaaaaaaaaaaaaaaaaaaaaaaaaaaaaaaagaactgaccctctgagcctggttcacagcctagcttattaaagaatgaatgagtgcctagagaggtgaatgaatgaaatgagtaagctgggtctgttaacccactttgcagaagtatggcaagaggtctggtaaaggaaggcagaggtggctgcctggggaatttggggtagggaagggaggcccgggggacggagccccatctgacccccaccctctttctttgcccctgcagaccatggcagccgtgaccatgtcggtgcccgggcggaaggcgccccccaggccgggcccagtgcccgaggcggcccagccgttcctgttcacgccccgcgggcccagcgcgggtggcgggcctggctcgggcacctccccgcaggtggagtggacggcccggcgtctcgtgtgggtgccttcggagcttcacgggttcgaggcggcggcgctgcgggacgaaggcgaggaggaggcggaggtggagctggcggagagcgggaggcggctgcgactgccgcgggaccagatccagcgcatgaacccgcccaagttcagcaaggccgaggacatggccgagctgacctgcctcaacgaggcctcggtcctgcacaacctccgggagcggtactactccggcctcatctacgtgagtgggctcctgctggggggcgcgtgcggcggagttgctgccggttggggaaccaggtccaccacccggctcccctgcattaacttgaggctgtttatcatctgtatcccatgtcccgtgactgttcctacacttacatggttgccaaattatgaattgttggattactaggacagcctcggaacctactggggacattgcatgatacatatggtagataaactgtattattttcctaaagtataaaacgttccaatttctcagatatagctcatcccgagttttaaggaacggaaacagatgtgtgacaatcattaatgtgaatcactgagtatagaaatgtgttgcttgaggttcaagaccagcctgggcaacaaaacgagaccctatctcttaaaaaaagataaattagccaggtgtggtggtggcccgtgcctttagtctcaccttctaggaagactgaggcaggaggatcacttgagcccgggaggtcaaggctgcagtgagctatgatgataccactgcactccagcctgggtgacagcacaagaccctgtctcaaaaaaagacaaaaagcaaaaaccttatgctaggctctgtgctaaatgcctatctattaattcattcaatctcaccataggaaagatagagtctattattattaccattttacctaagaggcaaatgaggcccagagagagttaataacaataaaaatgaacatttattaaacatttaccaaccattcttccaagctttctaaaatacattgcctctgtacattttcagaattataaagcatctgatcctcattttacaggtaagaaaactgaggcacagagagttcaaggtcacacaattagacctgacagagccaggtagtctgtcttctcactttgctgtggtgcctcttaagattgagatggggctgggaatggtggttcatgcctgtaatctcagtactttgagaggctgaggtgggtggattgcttgagcccaggagttcgggaccatcctgggcatggcaaaaccccatccctgcaaaaaaaaaaaaaatacaataaattagctgggcatggtggcacactcttgtagtcccagttacttgggaggctgaggtgggagaatcacctgagccctgaaggtggaggctgcagtgagctgtgatggcgctactgtactccagcctgggtaacaaatcaagaccctgtctcaaacaaaacgaaacaatacaaaaacccattgagaagagattgatgatacttaggttgactatggtagtcttcccacgtctgtgctaagcattggaggttcgttgcatttttaaaactctttacagcaaacggatggggtagagcagtggttcttaaccccacctctatggtagaatcatttggggaattcttagaaaataccagtgacggagccccaccccagaactttcagtcgagctctctggggctgtgacatgaacattggtatttttaataagcttccaaggaggttctaatgggcagccaaggggttattaatttcattgaacaaaagagcaaacaggattagagagattgacaaggaatatggacaatcataatgaaaaataataataagaggaggctagcaaatatttaatcgagcactcgtgatgtgccaagcactgttctaagtgtggcgtgtgagttatcagcttccctctgggccagggactgctgatatcacctgatgttcaggatgttaagtgacccacagccatgaaggaatcacgccaggatttgaacccaggcagctggttccagagtcatgctccaaactctagcttagactggtggggtctcacagctttgctccaacatccacccctctgaggttcacaaagcggaagattagaatatttttgtgaagtcccactcctacttggagatcgaggctctgagataagcagtggctggctcagggtccctcagcttgtggtggcaggtgtggaatttgaatcgagggctgtcggaccctgcatggggttggtgtcttctccagtctgcactggccctttccaaatcctcaaacacctttactagccctggaaaagaggcctctacatgatccactcccccacatctcacccaaggccacagacatcaggatgacatccaaaacatggatccactagttgccttttattcatttatatatattttttgagacagggtctcactctgttgcccaggctgcagtgcagcagcatgatcttggcttactgcagccttcacctcctgggatcaagcaactctcttgcctcagcctcctgagtagctgggactacaggcgcctgccaccaggcccagctaatttttgtatttttagtagagttggggtttcaccatgtttgtcagagctcgaacctctgagctcaagtgatctgcccaactcagcctctcaaagtgctgggattacaggggtgagccactgcatccggccactctttgccttttaataaatactctgagcgctcccagcaaccttgtaaggtatctgctgtcatccccgctctgcaggtggggaagctgagcctcagactagggggcaggatttgaacataagccccacaactaggaaccagctaagctagaacttgaaaccaggtcactgtgactgcagaccccaggtcctagccattgcactaggaagattattcagaaagttcaggagaaaaagtggtagggcctgagctaaggtggtggccagggagccagacttttggggcctaagaaatgaatgtgagagagaagattctagaattccagacaggaagcacattgggccttaataaagatcattagcacttagtgagtacctgctttctctgctgggtgctgttctaaatttctttccaatatgatcttattgaccccctccccatccacataaggttgtgaggtagggattatcaccctctttttcccacagcttggagaggggaagccatttgcccaacagaagctgatagtggctaaaatattgagcatgcagtgtttcaaggtccatgttctgttttttgtttgtttgtttgttttagacatagccttgctctgtcacacaggctggagtgcaatggcatgcttacagctcactgcagctcaacctcctgggctcaagtgatcctcctgcctcagcctcctaagtagctgggactacaggcacataccaccaagcctggctgattttttaatttgttgtagagacagtgtttcacaatgttacccaggctagtctcaaactcctggactcaagtgatcctcttgcctgggcctctcaaactgctggatttacaggcttgagccactgctgtgcccagctggggttcacattaaaccctctgcatgccacatgaacttgtggatgactcccaggcaccttatgtaggaagcactatttctgtccccgttagctaaagacactgagaccctgaaaggttgcttgctggagccacctggcctgaaaatgttacaggtgtgattcaaactctgccctatttaagacctgtgcttaatacatgtttgttgactgaccaactgatgatggggatggtggtgttgtccagtgaaaagtgggacatccagggctccagaaacccagtttctgccactaataggctgtttggctttgagttgctaagagtctcagtccctttcctgggacccttggggcagggagggaaccccttcgtagaacaccccgctctgagaaacacggaagatgcattatgtgatttcacactcagaacacttctaggtgatgggttaaaagccgcattttccagggctggaaactgaggtttagagaggacacatccttcattcaaattcacacacagctcaaaaatgctgcatctgaatttgaacactggatggcttcaaagtctgagtgatgagcctgagagtttgaggctgcagtgagccaggatcgtgccactacactccagcctgggcgacagagccagactctgtcccacccgcccccgtccaaaaaattccgagttagcctagggctcccaggtaggatgagtgatgtaagagtctccagacccatatctggcgtgtgttgcatgggccccgcctcggcctggctggtttttatccatgatctcccctaatccccacagcctttgtaatgaggtggggagtgtcgccctcggtttcccaaggaggaaactgagactatggggaaagtcaccaggctgaggggagcgggggggcaggtctgtcttcagagccccgagggctggagcagccattcctgacccttccaggagggcttccccagctgtctcccaccctgtgggggtgcaccagcctttgttcttccccccagccttgttgaccagctcaggtttccgttcccagggtgtcgccctggaaacaaggtgtggctggcaggaggggccagggtgggagggtggcgtggggagtgggttcctccgccagccaggagtgggggccggggcgccggcagccatgagataccctcccagggaatgtggtccggccgccccaccctctgagagctggggggagctcccggagcagccctttcaggcagggagggcagacacccagcaaaccggttgttctgctcctggctggccacccaggccacccaccctcccaccgttagaaggttggcacctgggaccaggcagcctgtggtggccacaccctactgtgcttgagaagctcaagctccctgggagcttaaaacagttctgctggccgggcacagtggctcatgcctgtaatcccaggcatgccggggtgggaagatcacttgagccaggggttcaagaccagcctgggcaacatagtgagacctgatctctacaaaaagtaaaaattttaaaaattggccaagcatggtggtgcatacctgtggtcccatctgcttgggaggctgaggtgggaggattgtttgagcccaggaggtagaggctgcagtgagctgtgttcatgccactgcactccagcctgggtgacaaagtgagatcctgtttctaaaaaacaaaagaaaaagatagtcctgctgctaaccagcttagaaaccagctagctgggtgactagcagagtaggttaccctactttatcacacacagctagaaaacacatctgaatttgaatcccgggtggcttcaaagtcaagcgacaagcccagagtagctaactagctaagccactaagcaggtaattctctggctagtttagctagctaactttagatagcttggctagttagctctctggctggtttagctaagtggctaactagctctctagctatgtttaactgcttctgtgagtgttgagcccctcttgcctacatgatacccttgtgagctggatttgttcttaaactgttacagagtcctgaggccgggtgtgaaggttcacatctctaatcccagcactttgggaggccgaggtgggcagatcacttgaggtcaggagttcaagaccagcctgggcaacatagagagaccctgtgtctacaaaaaaatacaccaggtgcggtgactcaagcctgtaatcccggcactttgggaggctgtagtgggagaattagttgagcccaggaattcaagagcagcctgggcaacgtagtgagaccccgtctctactaaaaataagaaaaattagcctagtggattgacacacacttgtgatcccagctactctcgaggctgaggtgagaggattgctttagtctaggaggtggaggctgcagtgagccatgattgtaccactgcactccagcctgggtgacagagtaagaccctgtctcaaagaggggaaaaaaaaaaaagactaggcatggtcatgtcagcaggactgttatgtgtctattatcagtagaaaccgcaggtatgttcctgttgcatttcggttattgcagataccacaggcacccttccagagatagtccatgcatattcaaatgaatatataaaaatatataaaaagattcctcttccatcctttcttttttttttttttttttttttttgagacagagtctcgctctgttgcccaggctggagtgcagtggcgcaatcttggcttactgcaacctccgcctgccaggttcaaacaattcttctgcctcagcctcccaagtagctgggactacaggcatgtgtcaccacacctggctaattttttttgtacttttagtagagatggggtttcaccatgctggccaggctgggctcgaactcctgacctcgtgatccacccgtctcggcttcccaaagtgctgggattgcaggcgtgagccaccgtgcccggccctcctcttccatcctttctaatgcaaatggtagctcctcacgcagtcctcaactcacctccttttacttgatattgatttgaagacagtcccatgtctatacataagagctttgtaggaatgcatcgtatgaagatgcattcaggtcgtttctagtcttttgctgctacaaagagtgcctcaaccggtcacctcgcacatggtcatttcctgtgtgagtccaggcagccacaggctgtgacccaagtctggctggctgcaaaggccttgttctctctcaggacaaatcctcacccagacagtgcctttgtgcaatttggaaagattctttgctaccatcagcctgaaaatgctcataacaaacattcaaatctacattgttatggtgtagacataccatgtgcagatagatgcccttgtgcagtgcacggcctgctcagcagccccatgacgcctttcaggccgtgggcagccatctgagaccctctcccctctcacccactgcagacgtactccggccttttctgtgtggtcatcaacccgtacaagcagcttcccatctacacagaagccattgtggagatgtaccggggcaagaagcgccacgaggtgccaccccacgtgtacgcagtgaccgagggggcctatcggagcatgctgcagggtgagtgctgggtggggctgtaggccagcgaggcggctcttcaacgggggcctgacctggggctgccggaagccagagtccaggtcaaatgacagcttgtagacttgactctgtagggcttcttagggggctggagggagcacaagtagaggcctgagtgggtgaggtgctaggtcctagagtctttttacctgtctccatgttcattgtctcttttattattgttattattattattagtttgagacggagtcttgctccgtcacccaggctggagtgcagtggcatgatcttggctcactgcaacctctgcctcctgggctcaagcgattctcgtgcctcagcctcccaagtggctgggactacaggcgtgcaccactgcgcctggctaagagatggggtttcaccatgttggccaggctggtctcaaactcctgacctcaagtgatctgcccacctcggccttccaaagttctgggattacaggcataagccaccatgcctggcctctttttaaatttttaaataaattaatttatttttggccaggcgcggtggctcacgcctgtaatcccagcactttgggaggctgaggcaggcggatcacgaggtcaggagatcgagaccattctggctaacacggtgaaaccccgtctctactaaaaatacaaaaagaattagccgggcctggtggcgggcacctgtagtcccagctactcgggaggctgaggcaggagaatggcgtgaacccgggaggcggagcttgcagtgagccgagatcgcgccactgcactccagcctgggagacacagggagactctgtctcaaaaaaaaaattaatttattttttatttcaatagtttttgggaaacaggcggggtttggttgcatggaaaagttctttggtggcgatttctgagattttggtgcacttgccatcggagcagtgtacactgcacccaatgtgtaatctatccctcaccaccccccactacccttcaccctgagtccccaaagtcagttgtgtcattcttatgtttttgcatcctcagaacttagctcccacttacaagtgagaacatacgatgtttgattttccattcccgagttacctcacttacaataatggtctccaatttcatccaggttgctgtgaatgccattatttcattcccttttatggctgagtagtattccatggtgtatgtgtgtctatatatcccatggtgtgtatatatatattttttatatatacacaccatgggatatatactctctctctctatatatatatatatgagtattccatggtgtgtatacactcacacacacaccatgggatatatatgtgtgtgtgtgtatacacaccatggaatacatatatatatgtatcacagtttatctactcgttggttgatgggcatttagtctggttccatatttttgcaattgtgaattgtgctgctataaacatgtgtgtgcaagtgtctttttcatataatagcttcttttcctctgggtggataccccagagtagggttgctggatcaaatgatatatctacttttggttctttaagtaatctccatactgttttccataattaaaaaatcaaaaaataacatgttggtgtggatacggtgaaatgggaacacttttacactgctggtggaatgtaaactagtacaaccactattgaaaacagtatggagattctttaaagatctttgttccctctttctccgaacaatattggttgggtgtggggcttttacgaacatttcccttgagacagtaattcccagagtgttcattcatttattcaacatttatcgttgaattgtagatctgatctccattgtcacggggtaaatgtagccccttagacagatggcaggtcaaggcagttgtgtacagctgagcaggttgtacactgaacaagggtatccatccaaggggctgccattcataccatgacaacatagatcagtcctggcagaattacatgattaacatctattatagatataatgcccttattatatatttgctatatatcatctattttcatagatatttagtattttttgtttatatctattaaacatttaaaaattatatctatttacatcatataacatataataggccaggggcggtggctcacacctgtaatcccagcactttgggaggccaaggcaggagaattgcttgagttcaggagctcaagaccagcctgggcaacataacaagaccctgtctctacaaaaaaatttaacaagtttttgttaaaaaaggaaaaaccccatgtaatagtacacaacattcagacccttcgatcatggcttcgaaacccatcggtgccgctcgccatttccgtcccgcaccccagcctcacccaccttcctgtctgtcaaacatccctaagtcagtcctacctcagggcctgaatatgaatatattatacttattgaatatgcatattaaatatgagcaaattattaaatttatatatttgattaaatagtataatattgtgaatatattatgcttatttaatatgcatattcaataagtattttattttattatactttatttttattatacttcatttttattttattatactttatatttattttattattatataaatgtaatgttgatttaataaattatacctattaatatgcatattcaataagtataatgtgttaaattaaatagtataacatattaaattaaatggtatattaaatagcataatattgtaaacatattatgcttatttttttttttgagacagagtctcactctgtcacccaagctggagtgcagtggcatgaccttagctcgctgcaacctcctcccgggttcaagccattgtcctgcctcagcctcccgagtggctgggactacaggcacatgccaccatgcacagctaatttttgtatttttagtagagaccaggtttcaccatgttggccgggctggtctcgaactcctgacctcaggtgatccgcctacctcagcctcccaaagtgctgggattacaggcatgagccaccatgcccggcctaatatgcttatttaatatgcatattaaatgggagtatcaaatgggaatactgaagtctccaggtagaatagtggattcatctatttctcctggcaggtctatcagtttctgctggattaattcatttaacctcgtagcaaatctatgaaataggttatctccttgtccctgatttctgggtggggaaactgaggcacagagcaaaacagtcatggtcacactggtgggtgtatgctgaggtgggattcgaacccagggcccctgaccaccgcctccctgtatgtcacactgtgtgttatatttcctcctgtgccgtgcactgtgctgagtgcattttgagcattctgagttctgactacagccctgggagatggcagctgttttgagccccatttttcagatgggaaaacagaggcacaaagcaactcagagactggcccaaggtcacgcagcaagtcagagaggcagccgggcggtgaacctgtgtgcatatagtcccccataccaggctgccaagtctgaggtcctactggacgcagcttactccctggcttgaagacacccagaggatgcctgtcctgcttaaaaaaacattcagaccctttgatcatggctttatttatttaaatttatttatttagagacggagcctcactcttgtcacccaggctggagtgcaatggcacgatcttggctcactgcaacctccgcctcccgggttcaagtgattcttctgcctcagcctcctgagtagctggggattataggtggcgccaccatgcctggctaatttttgtatttttagtagagatggggtttcaccatgttgcccaggctggtcttgaactcctgacttcgggtgatctgctggcctcggcctcccaaagtgctgggattacaggtatgagccactgtgtccagcctaatcgctgctttaaaacccatcccaccactcgccatctctgccctatcccccaacctcactggcctttctgtctctcaaacatttctaactcagagcctttcccctggctgtgccctctgcctgaaatgccacctccactgagaagccttccctgctccttcccccaagtcaattcttattacctaacaccagggttttggaatcctggctctactgacatttggggctggatgattctttgtcgtgggaggctgtcctggtcattgtaggatgtttagtagcaccccggcctctacccactcagtgcccatggagctctcctctctcagggtaataaccaaaaatgtctcccagacattgccaggtgtctcctggcgggaatggaggacataattacccccgtttaagaaccactgcttcggccgggtgcagtggctcatacctgtaatcccagcactttgggaggccgaggccggtggatcacgaggtcaggagatcgagaccatcctggctaacacagtgaaaccctgtctctacttaaaatacaaaaaattagctgggcgtggtggtgggcgcctctagtcccaggtacttgggaggttgaggcaggagaatggcgtgaacccgagaggcagagcttgcagtgagccgagattgcgccactgtactccagcctgggcgacagagcaagactccgtctcaaaaaaaaaaaaaaaaaaaaagaaccactgctttattctagtactgattcaattttcttcccagtgctgatcggtatttgattgtaggtttctgtcccctacatcttaagtggaagctctgtaggggcacacaccctgccagttccccactcccctccatgcctggcgctcagtaggtggtcagcatgtgattgtggaatggctgtgttaggcccagggcaggcgctggggtagacatcttatattacaggacctcgcttctgtctttgaatctcacatgcccagcatgaggcagcacacagtagggtctcacgttgaggtcgttgaatgaatcatattctcttcagttgagggaggctgtctccattttacgggtgaggaaaccaaggctcagagagggacagctgctttcccagggtcacacagcgagcagggggctgagctgggtggggaattagaatccaggattgttacacatcaagacccaagcttttccttactccctgggaataatttttaaaatgcagcggccagtgtaagggaccagagggccctgctagagactctctcagatgacatattcccccactctgtcccctacagatcgtgaggaccagtccattctctgcacgtgagtaatctggaaggacttcctggaggaggagaggtctgggtggggcgtggctgtgtttggaatgggcagggcaggtggggagcttgcctgaggtcattgccaacccctttgcttccccttgtcatccccacagtggagagtctggagctgggaagacggaaaacaccaagaaggtcatccagtacctcgcccacgtggcgtcgtctccaaagggcaggaaggagccgggtgtccccgtaagcaaccccgccttgggtcacccccgggccctgccacagcactgccccttccatcttgggctttccccacaattgtctcttcccctcatggaggtccttctcctagacgcctatgccacctgagcacctactgtgtgcctggggtggggctggaagcagagtcagggggacacagaggtgtgagggtcagtcttggtctcactggctctcggaatggctcctagtacttagtaggtgctttcttttctgagcacctactgtgtcaagcctgattttaggtgatcatgatgcctgggtttgtcgtctaagtgaatgttatatggtgccctccactgttccaagccctgttctcacactgccttacttacccctcgggtggggtgggtgctgttttcctgcactgaagacggagagcccaggcatgggaggggtgagtcagttgttggtcatgcaccgaggaagaggtacagtgaggccgggcacagtggctcatgcctgtaatcccagcagtttgggaggccgaggcaggaggatcgcttgagcccaggaattcaagaccagcctgggtaatatagtgggaccccatcgctacaaaaaacatttttgaataaaggaggtagagtgggattcaaacccaggagtgtggtcctccaggccaccctactccacatgcccggtttccccagtcccccttcccccaccccccatgccaccacctgagatcactggttcacctgtgtgtctgtccacgttccatgtgctgtgtcctggtccgtgtctcgtgtcccgtgacttcctcaggcctccgtcagcaccgtgtcttatgtgagtagcaggggatcacctcgagtcttgctgcccctaatgccttcccggccacccaatgcatgatcttcttggtagacagggcccaaggcagcagtggtcccacctgccagggacccctctgccccaccactgctattcatggcggccctgctgtgtgagtgtgtgcagatgggccacagacaccaacatgaaacaatccagagaacaaaactgccacttactgctgatctactaaatgtgtccagccagggcccacagatgctgcgtgcacacaaccagagtgaacagtgtagcaagggaaatacacgcatgtcccatgttcttctgtgtgccaagtcatgtgcccttcactttgtgtatcttttcatttgacaaagcatccacctagctagatcatttcatcttaacacaagcaagacatggactgagagaagacataaacaggctgccatttatgaagcacctactgtgtgccaggctctgacaccaagggggctggagggaagtttggagtagagttcctgccaaggagtagcctggtggggctaggaacccactattttttgaaggcctattatatgccagactgcttgaagcactttacataggtggtacagatttttgccttacttaaaaattctaggctgggtttggtggctcaggtctataatcccagcactttggaaggctgaagtgggaggattgcttgaggccaggagttcaagaccaggctaggcaaaagagtgagaccccatctctactaaaaattttaaaaagtagctgggcatggtggtgcttgcctgtagtcccagctactcaggaggctgaggtgagaggattccttgagcccaggaatttgaggctgctatgagttatgaccatgccactgcactccagaatttctacaagcaacacatgagtacatattcattgtaacaacaacaaatcagatgaaatgaaattcctgtttcctcccctcagtccccttccttggagtgccttacactgttgacagtttggtgtgcatccttgcagacctttctccatatgtttacaaacatgtatatatctgtagatttaagagtcctgttttgtggcgtttcttccttaattcatttcttattaatgggataacattgtagacattgttctgcaacttgtttttttgtttggcttggtttggtttggtttccacttaacaacatgtcttggagatgcttccctcttcccctcacaatagacagatgggcaagacccggatatgggaagtgggtacacgcccagacacacaaaggcccctcacacacagatactcagtcagctggagacacagcccgagctgggctggcctggcctcctgccccattctcactgacctcatgcatcatctcctgtgcccggcagggtgagctggagcggcagctgcttcaggccaaccccatcctagaggcctttggcaatgccaagacagtgaagaatgacaactcctcccgattcgtgagtgccaggggtgggcagtgctggctgtgtcagggatacaggagctgggaacctcagggtgggcttcagggggaaagacacgtggatctgttgagggaggaggggctgggggtctggactcttgagtctgagggaggaggggctgggggcctggacccctgggtctgagggaggaggggctgggggcctggactcttgagtctgagggaggaggggctgggggcctgaacctctgggtctgagggaggaggggctggggccctggattcttgagtctgagggaggaggggctggggacctggactcttgagtctgggggaggaggggctgggggcctggacccctgggtctgagggaggaggggctgggagccccagacccctgggtctgagggaggaggggctgggggcctggacttttgagtctgagggaggaggggctggggacctggacccctgggtctgagggaggaggggctgggggcctggacttttgagtctgagggaggaggggctgggggcctgaacctctgggtctgagggaggaggggctggggccctggattcttgagtctgagggaggaggggctggggacctggactcttgagtctgggggaggaggggctgggggcctggacccctgggtctgagggaggaggggctgggagccccagacccctgggtctgagggaggaggggctgggggcctggacttttgagtctgagggaggaggggctgggggcctggacccctgggtctgagggaggaggggctgggggcctggacttttgagtctgagggaggaggggctggtggcctggacccctgggtctgaaggaggaggggctgggggcccagatccctgggtctgaaggaggaggggctggggccctggactcttgagtctgagggatgagggagtgcaggcccggatccctgggtctgagggaggaggggctggaggctgcgtgcctagttccaagggaggagcagctggggaccagggggctggggaaagaagtccaaggggcccggaccttgaattcccaaggagccccccgatggggactcaccacaggatggggttcaggtagagggagcaaggaagtgggggggcagccgcagctctgggagcagtgggtgtggggtttgggctgttgttcacgtgtgagtggggaaggggaccctctgctgaagcccacccactttggtctctcccagggcaaattcatccgcatcaactttgatgttgccgggtacatcgtgggcgccaacattgagacctgtatcctctcacagcccatgggggtggcagccaaggggggcagcctttcagacagcactgagtatggaaagcacctcccactgcagggaccccttacctgctactcagatgggacctgatgctcaggcggcatctgcatggggaggggagggtgggacttctggtgtgtatgaggccagcacagcctcgctatggggtggtgggttggggtccacccagttcagccataaggggagtcccagcacttagcctgcagtggcactcatggtgacccatgacagtgaaatgacatagagcagtataagcaaagggaaaaggcacgtggggccaagtccccagggaccaggcacaagctcctagaaccctctccagcagaggcacacaggacaccaggtgcgacaacacttatgaaatgctgtcccggggaagcacagagagactcactaccagggttttcactggtggctggccacatccccgcctgcaccccccgtcccccgcccttagtatgaaccaaaattccacactcccgggaggaaagcaggtgatcagtgtaaaccacagtgtttgcacaaaccctttaggtctagcgaacccctcatcctgttagaggatgctggaaccctcccgaaatccaggtgcccagacgctagccaggggcccacctggccagcaggcctttccaggggagcatctcaggacggctgttttctgctcagatggcatatgggcgtttaaaggaaattaaacaataaaacacaggcactctgggagtgcagaaattaagagaatgggccaagaaatcgtaccaacctgggttcaaatcccagttctgccactttgagactctggggacttgggtacgtgacttggcctttccctgcctcagtttctccctctgtagaaggagaaggaacatagaacctacccaagaggggtttggaggattttggagttaaatgcttggccacagcacctgctacatagcaggcactcaagaacaagctattattagcaattaatgattaaattagtggccaggcacggtggctcatgcttgtaatcccagcactttgggaggccaaggccggtggatcatttgaagccaggagtttgagaccagccaggccaacatggtgaaaccctgtctctaataaaaatacaaaaaaattagccgggcgtggtggcgcatgcttgtagtcccagctactatggaggctgaggcaggagaattgcttgaacctgggaggcagaggttgcagtgagccgagatcacgccactgcactccaacctgggtgacagagcgagactctgtgtcaaaaaaaaaaaaaaggttaaattagcaatatctgtatcaatgctaatattattgactaatattgattgataattactaatcaataacattaacaactgctaataagccacatccccatcccagaggcatctgataagctcacgctcttccataatcagtggggaggggtttctcctaagtctgctcagggcatgaagcagccagccggcccgttggttctgctgccttgtgggagatgcttcctgggctgtcaccaccccaagtccccagcagcaccgcagcccctgctcctgccgttttctgctcatggctgctccttcctccaggtcctcttgcccttggctcccacctctccatggtacctgcatatccaggttcttggagctcatggctcttcctgccaaactgtcctggcacttgtgtgtctctgcttatattcatatttgccttctctgtccgcttccacctgctcactttctcctgtccacgctccccatgcagtgtggctgcccctcctgggcacagctgtggtcccggctgtctcaggcaccagtggattgatgctcatgaatcaggtcccgcccccaggccaatcgtatgagtcttgggatggcctgccgggtaaggagcaccaccctgtgtggctgacccctcggcactagcatcagtgccatcgtgaccagcttttctggagtgctgactgtgtgcccaccgccacctcgagagtccccatgatatctcagttcctcctctctgcaaccctgcgaggtggctgctgctatcacccccgcttcacagaggaggaaaccgaagctcagggctgttgtcccccagggttcgacagcctgcgtgtgctccctgccttccagctttccttgtgggagcccctccacctgtttctccccatctaaccaagcaggttacaccccagggcttctgggaaatggacctcaggtttgcagctgatcttggtccaaatatgtatttggtggtgcatgagtgtggtggtgcatgagggacacagaggggttaagcaaagtgtatggtgttttggtgttttgttttactctaagatgttttggctgggcgcagtggctcatgcctgtaatcccagcactttgggaggctaaggctggaggatcacttgagctcaggaattcgaggccagtcagacctcctctctactaaaataaagaaaatttaaaaattagccaggtgtggttgtgcacacctgtagtcccagctacttgaggctgaggtgggagtattgcttgagctggggaggcggaggttacagtgagctgtgattgtgctgctgtgctccagctgaggcaacagagccagaccctgtctaaaaaaacaaaacaaaacaaaacaaaacaaacaaaagtcttgccaccttttaatatgtaagtttgacacgtgactttcttgggagggagagcatgcagagtgacagtctagttgaaggtgggagctgattatctgcatggggaagctgaggctgggagagtactaatggcaggagacattctcacctgcgggtaactttgaaccaggcattgttcagggtgcttcatgcacaataagtcatttatcttcacagcaactcatccagggtcgatgaggtttctttgttttgtttttgtgacagagtctcactctgtcgcccaggctggagtgcagtggcgcaatctcggctcactgcaacctcctcctcccgggttcaagcgattctcctgcctcagcctcccaagcagctgagattacaggcacccgcgatcacacctataatttttgtatttttagtagagatgggattttgccatgttggccaggctggtcttgaactcctgacctcaggtgatccgcctgccttggctttccaaagtgttgggattacaggcgtgagccactgcgcccacagggttgatgagttttttagagacagagcaagaccctgtctctaaaaagagagagagagagagaggaaggtctcctaaaggtgttattttcaagccccttgaacaggtagatgaggaaactgaggcacaagtgcttaagtgacatgagcacggctgctcttccagttagtggcaaagtcaccagcctgggctgtgagcgactccactacaccacaggagagaagggggcagcgtgggcagggcaggctcctgtagtggcctggcagcgtcggggccgtcccttcccctctagcaccttgactcgctgtgtccagacctgctggagaagtcgcgggccatccgccaggccaaggacgagtgcagcttccacatcttctaccagctgctggggggcgctggagagcagctcaaaggtcagtgccgccccgtcctaccctgctcacccgggagagggtgggcaccatgtctctcgggggccccttctggggaggaagcaagagtggggggctctaatatccgtcaaacaccgacttcgcatgaggctcccgcagcccctgctctcgctgcgtagtggcgtctgtcgcacggtgggttctgctgcgctctggttccagctctgtcccgggtctggctcgcgcccgctgtcacggccacgcagcccccgccgcctggtggctcctgctcacgctcgcttccgaagctccgtggcttctctctcgcgcggcttctcctcactccggcgggtgactccggctttgctgaggctcctcctggttcctgacgacgctggtttgtgttgcttctcggctcgtgctgcctcgtgctcccctctgctctggctcctaggccacggctcttgccggagtcctcctgtccctgctccctgttcctcctgccctctggctgcccaagcgcccttggctcctgtttgcagtggctggcactgccctgtagctccctctgctcctggctccttcctcctggtggctcaggccgcttcctggctcctgcggccacatagcccctcctcatccaggttcccactcactgtggcctttgagaccgcatgtccttgggcgccggcccctgccatcccatggcctgtgctgacttgggcctgcagccccactgcttctgccaaccagtggcccctgcctgctctgggcacttctagagactcaaaagtccctgcggagggagcaaagaggagtggtatacactgcgtggggactcatgcctgcaatcccagtactttgggagggtgaggcaggaggattgcttgagcccaggaatttgagtccagcctgggcagcatagtgagacccccatctctgtaaataataacaataataataagctgggcatggtggcacacagctgtagtcccagctatgtgggaggctgaggtgggaggattgcttgagcccaggagtttgaggctgtggtgagccatgattgcatcactgcactgcagcctgggcaacagagcaagaccctgtctctaaaaaattaaaaaaaaaaaatagagacagagtggtggtctcataggtgctaaacgcccactccacccccgacccttcccaccacacttgtgagtaaaggcccccacccacttgacagtgaggatatggcatgtcctgggattgccaccgatgaatccaggatgagtctgactgcacagcccacctttgaccttgaccccactcattgtccctgcagccgacctcctcctcgagccctgctcccactaccggttcctgaccaacgggccgtcatcctctcccggccaggagcgggaactcttccaggagacgctggagtcgctgcgggtcctgggattcagccacgaggaaatcatctgtgagtgagccccgtggaggccaggggtaggggggaaccccacggagagctggggacctggccattcatgccccgatctctttgagcaagtgtttattgagcacctactgggtgcaggcaccggggccagagcagggaatgaggctcacagacatctctgccttgaggaagctgacaaaatgagagcccccaaccaagtcaataaggaatcacatggcctgttagtagactatgagtgcagctgggcgcagtggctcatgcctgtaatcccagcactttgggagtcccaggcaggtggatcatttgaggtcaggagttcaagaccagcctggccaatatggtgaaacaccgtttctactgaaaatacaaaaaagttagccaggcgtggtggtgggcacctgtaatcccagctactcaggaggcttaggcaggagaatagtttgaacccaggaggcggaggttgcagtgagctgagatcgcaccactgcactgcagcctggtcaacagagcgagactctgtctcaaaaaaaaaaaaaaaaaaaaaaacaaaaagaccatgagtgccatggagaaagatgggggagggaggggcacagctttaagcaggggctcaggggagggtggactgagatggggatgtttgaacgaagtcctgaggaagtgagggaatgagcactggagatgtgggggaagagcattcctggcagagggaacagcctgtgcaaaggccctgaggcaggaaaggggtggcatatttgagggattgacacttctggtggtggagctgcagaggggtggggagtctcaaacgccagcctaggaggttgggactttgtcctggggtgctggggagctgtgggagggctgggagcaggggttggacaaattcagctctgggagcaagaagaccccttgggggccgtgtgagagacacactggagtgggtggtgctgagaccagaaggaggctgctgaggctctagggaaggctcaggacgctgtcccagggctgctcaggttggcccaggctgcgcggcactggttatttggtgttaaatgctcagctcatcacccccgtgtcagggtgctgtgcccacccccacttttttttttcttttgagagggagtctcactctgttacccaggctggaatgcagtggtgtgatctcagcccactgcaacctctgcctcctgtgttcaagtaattctcctgcctcagcctcccgagtaactgggattacaggcgcccgccacctcgcctggataatttttgtatttttagtagacatggggtttcaccatgttggccaggctggtctcgaacccctgacatcaggtgatccaccctcctcggcctctcaaagtgctgggattccaggcgtgagccgctgcgcccagcctgtgcccccacttttttcaccaaacagcatgttttgacagcagctctgtctcagtgctgcattagtttgcttaggctaacaaagtaccacaaacctagtgcctaaaacaacagaaattgattgtcttgtggttctggaggccagacgcccgggatcgtggtgttagtgagggtggttcatcccgggagaatcggctgcaggtctctccctaggctcctggtggttttctggcaatcttcggcgttccctggctcatagtcgcatcacccgatctctgcttttgtgttcacatggcggctccctgtgtgtgcatctgtgtccaaaattccccctcccccctccccccgacccccccgccccaacctttttgtttttttgagacggagtcttgctggagtgcaagtggtgcaatctcggctcactgcaacctccacctcccgggttcaagcgattctcctgcctcagcctcccaagtagttgggatcacaggcgtgtgtgccaccacacccggctaatttttttgtacttttagtagagacagggtttcactaagttggccaggctggtctcgaactgctgacttcaagtgatcctcccgcctccgcctcccaaagtgctgggattacaggcatgagccaccgcacctggcctcctaccctacactggtatgattttatcttaactcgttacatccgtaatgaccctgtttccaatactgtcacattctgaggtcctggggtttagatccccaacatgctttttaggagggggtggtgtagacatgattcaacccgtaacaagtacgtaggtggacctccgccttttcagaggctgcgtaatgtttcattgtttgcgtgaactatgattcttttaaccaagccctccaaagaaagacctttaggtgtttctgggctgagccagggccgcctctgggtctgattgtcttctggtctctggcgctgtgggaggccccaggagctattgttggctccagggccggattggaagtgctggaaatggagcgtagcttggctgtctacccaggctgcaaacagccgggcctcttgtggcctattgacacagggtcttgggcctctcccacccccaccccgccgcatttcccaaccagggttgcataattccccagcctgcatgactccgcagctgggcagctggcacacaaattcagactgtggctgcaatggggacctgggcctcccagcctgtcctcttaggtcctgcctggcctcttgtcaccatgagctcatgtgaccctcctggcagctgccctgctgtgtggcaggcgcaggcagcagctctgatttttggaattcagaaataaaaactttgcagcaacctatgcatgtagtaacataaactgaatgtggctaaaggttgtactgacaaaaccaagccttcccactcttccctggccctagtttcccactgttgagcttcttgtatctccttccagaaatattttaagaatataagaaaagacacatattatttgtctataggaggaggcattctctaaccccacagctgatgttcagctgtcaacatcactgtggtgataaaaaaaatgtgaagcaatttctctattggttcaaaagttccggccaagtgcagtggctcacgcctgtaatcccaacagtttgggaggccgactgaggtcaggagttcgagaccagcctggccaacatggtgaaaccccgtctctactaaaaatacaaaaattagccagacatggtggtgggcgcctgtagtcccagctactcaggaggctgaggctagagaattgcttgaacctgggaggcagaggttgcagtgagccaagatctcaccactgcactccagcttggagcagagcgagactccatccaaaaaaaaaaaaaaaagttcctggatgttggttgctccagctggccccccagctccctacccttccactagagacccccctggaccctggcccagcactctggcctaggttagtctgggccaggcagtgctagagttaaatactcagcttgtcattggctcactcctgtaatcctaacactttgggaggccgaggtgggagaatcacttgaggccaggagtttgagaccagcctgggcaatatggtgagaccctgtctctactaaaaattaaaaaaaaaaaaaattaaccaggtgtggtggtgcaaatctgtagtcccagctacttgggaggctgaggtgggaggattaagtccaggagtaggagactacagtgagctatgattgcaccactgtactccaggctggtgatagaatgagaccccatctcaaaacaccccaaaacaaagaaacaaattactcagctcatcattcccatggaaggatgctctggaccccctctccactgccctttcctacagactggtatattttggccatagttgtggttcaaaatagatggacctcattcctttttgcagctgcgtaaggttttattgtttaaataaactatgattctttcagccaatcccttgcagatagagccttaggttgtttccattccattactattggaacaattaaaaaaaaaaatgctaagccagcgcagtggctcacgcctgtaatcccagcactttcagaggccaaagcaggcagcttgcttgagctcaggagtttgagaccagcctgggcaacatgatgcaacctcgtctttacaaaaaacacaaaaaattacctgggcgtggtggtgtgcgcctttactcccagctatttggggggctgaggtgggaggatctcttgagcccgggaggtggaggctgcagtgaaccgagatcatgccactgcactccagcctgggcgacaaagtgagactctgggtcaaaaagaaacaagctaccgtgaatatccttgtaaacaggttcttgtgctcttgtggaaacagacctgtaggttcaattcttagaaacgaaatgccagctgggcgcggtggctcacacctgtaatcccagcactttgggaggccgaggcaggcggatcatgaggtcagaagtttgagaccagtctgaccaacatggtgaaaccctgtctctactaaaaatacaaaaattagctgggcgtggtggcacatgcctgtaatcccagctactcgggaggttgaggcaggagaatcgcttgaacccgggaggcggaggttgcagtgagccaagattaagccactgcactccagcctgggtgtcagagcaagactccatctcaaaaaaaaagaaaaaaaagaaatgaaatgccatttccaaggagacttgtgattcttgtttgcgttcagcattaaaaaaatcgaacagctttaagatataattcacgtcacaccattcacctatttaaactgtgcaattccatagcattttgtgtattcatagagttgtgcacctatcatacagtcacttttagaacattttcagtagcccaagaagataacgcataccctttagctgtccccccaggccctgtccacagcctctggcaaccactcttctgctttcggtctctatggacttgcgtattctggacatttcatagcagtgaaatcatgccgtatatgatcctttgtgactggctgctttctcttggcatcattttcaagtttcatccacattgtagcatgcagtaggtttccttcctttttattgctgaataatttttattgttatcttcttatcatggaaaatttcaaacatgtatgcaaacagagtgcagaatgtaatgaatgccccaccaccaccagctggcagctgtcaccagctccatcaatgatgaaccggtgacctcttgtgtttcatctctccccaacctccctaccccaactcaggtgtgaacatttttttttttttttgagacagagtctcgttctgtcacctggggttggagtgcagtggcacgatctcgactcactgcaacttccacctcccgggttcaaacaattctcctacctcagcctcctgagtagctgggattacaggcatgtgccaccacacccgctaactttttttgtatttttagtagaggcagggtttcaccgtgttggccaggctggtctcgaactcctgacctcaagtgatccacccgcctccgcctcccaaaatgctgggattacaggcgtgagccaccgcacccggccatgagcattttttaaattgcagagaatctacctcgtcgctgtccacagggtggcgctagtttccagttcctccagcatatacctggagcacctgtgtccccacctgcacccagcaacgatggctggagcttttttgtctttgctgatgtggcagatgaatgagctctcattacagtttcattctgtgttttgcttacaaggagtggagttagtcaccttttcacagactttttttgacaagagacagagggtcagggaggtggggtgtcctgtcctaggactcaccccaattcaagaggaggaggcaaagccatggtggaaacgtctgaccccaaagccagcccatgatccagagagagaggtggacacctcagtgtcacccacagggagcccaaggcagaaagcatttggggccaatcaaggcagggtgtctgtccatctccttccccattttacatctctgcctgccaccccttggcaccataaatgccatgctgagaggttgagcaggtagcctgggacacagggaggcatgccagcctctcacatgaggcatccgcaggctgggcttgctagtgatgggcgagtctgatgtcagcaacaagagctgactgccaggtcctcagggcatcagatgcgccctggggcctggcacaaacacagcttcctaagccaactgcaagaggccattttaaaggccattgatggaagccaggtctggacggggtctaagctgatgttaaggaatgatcattaagtttgctgggccagatgcactgtgggtctgtaaggatgtgtccttctttatttatcttttttattttttattttttttgagatggagtctagcgctctgttgcccaggctggagcagagtgcggtggtgtgatctcagcttactccaacctccacctccctggttcaagcaattctcccatttcagcctcccgagcagctgagattataggcgctcgccaccacacccagcttatattttgcatttttggtagagtcggggttcaccatgttggccaggctggtctcgaactcctgacctcaagtgatccccttgccttggcctcccaaagtgctgggattacaggtgtgagccaccacgactggcctaggatccttcatttaatcacatctgcaaagtcccttttgccatggaaggtcacattcacaggtcccagggattaggttatgggtatctttggggtctgttattcatcctcccacctcctctgaaaacatcagcatgtatttcctacgaacattcctttatacaaccacagaccagcagtgtcaccaggaaatcgagttcagcacagcactgttatccagtccacagaccttaggccagttgtcccccaacctccaaaaaaaaacaaaaaaaattctctcttgcgcatgatggagtctcactctgtcccccaggctggagtacagtggcgcgatctcagctcactgcaacctccgccccccagattcaagcaattctcctgcctcagcctcctgagtagctggaattacaggcatgcgccgccacacccagctgattttgtatttttagcagagacggggtttctccatgttggtcaggctggtctcgaactcctgacctcaggtgaaccgcctgcctcggcctcccgaagtgctgcgattacaggcgtgagccaccgtgcccagccctcttgctctctttttttcctggtcatccatctctttactctccttcagtctgaaactcttcctgagtctttctttatcattcatggttttgacacttgggaagattacagactggttgtttcatctgtatctgggtctgtttccctgcaattacattctagttacacgtttttggcgggagtattccagaagaaatgctgacctcccacccccactcacacacacctttttctttttcttctttttttgagacagtgtctcactctgtcacccaggttggagtgcagtggcccgatctccgctcactgcaagctccgcctccccggttcatgccattctcctgcctcagcctccagagtagctgggactacaggtgcctgccaccacgcctagctaattttttgtatttttagtagagacaaggtttcactgtgttagccaggatggtctcgatctcttgacctcgtgatctgcccgcctcagcctcccaaagtgctgggattacaggcgtgagccaccgcgcccggccacacacacctttttctaagccacctttgtgtagaagtacagtatacacaccaataaaaggagcacaggcccttggcatccagcctgggggagttttgggagggaacaccctgtatatccagcacccaggagccccccatgtcccttcccaccaccagcaccccctcaaggtaaccattattccgacttctaagagcatggagttgtgttgcctcttcttggatttggtacaaatagaatcacacggtgtgcagtttctcacctggcttctgtcactcagccgtgtgtttgtgacattcatccatgtccagtgagggaagggggctttggagaggccagttccacagacacattcactttgtaaacgttcctggagctggatgtctatagtatgtgtccttttctgtatgtgtgctgcgcatatgtatttacattcataaacctatgctacgccggcacggtggcttatgcctgtaatcccagcactttgggaggctgagttaggagaatcgcttgagccggggaatttgagaccaacttgggcaacatgccaagatcccatctggacaaaacatttttttaaattagctgggcatggtggtgagcatctgtagtccagctactcagaaggctgtggtgagaggatcgcttgagcccaggaagttgaggctgcagtaagctatgatcacaccacaccactgcactccagcctgggcaacagagcaagactctgtctctttaaaaaaaaatctatgctaaaatgaaaaaggaaaatggaagcacagaaattaaaagcactgcctcccaggccaggcacagtggctcatgcctgtaatcccaacactttgggaggccaagtgaggaggacttcttgaggccaggagttggagaccagcctgggcaacagaatgagatctcatctctattaaaaaaataaaataaaataaaaaaataaaaacagaaaaacaaacaaaaaaacccaaaaaaacaaccacagactgccctggtttgaatcccagctctgccagcctatgtgagctgggtgatcttgggtgagttgattgagtgcctcagttaccctatctgtaacatgggaagcatagaaggacctgccttgttcagtggttatgaagggtacctgaagtcatttgtaagtgtttggaacaggttgtggtatggaggaagtgaaaaataaatcaaggtccatttcagtgcacaaatggtacaaactgttctagaatgaatggttgaccaggcggctgaggggttgcactgacctatggccccaccatgaaagcatcagatgcagccaggcttggtgactcatgcctgtaatcccagcactttaggaggcccaggcgggcggatcacgaggtcaagagattgagaccatcctggccaacacgatgaaaccccgtctctactaaaaatacaaaaattagctgggcgtgttggcatgtgcctgtagtcccagctacttgggaggctgaggcgggagaatcacttgaacccaggaggcagaggttgaagtgagccaagattgtgccactgcactccagcctgatgacacagcaagactctatctcaaaagaaaaaaaaaagaaaaagcatcagatgcaaacacaaacacagcctcacctgctgtccccttgactcaaacaccacacacagctctgctgtcaggggagagtgttctgaaaaggtgatcaattttgattgagtcctgagcaaagcaaagaacagccttctctgggatttacacagtggctgtcctcctggaaaattcactgtatattaattttttttttttttgaggcagggtctctctctcattgcccaggcttgagtgcagtggtgcaatcatggctcactgcagcctcgactttccaggctcaggtgatcctcctacctcagcctcccgagtagctgggaccacaggcatccaccaccatggccacctaattttttgtatttttagtagagacaggttttcactatgttgcccaagctgatctcaaactcctggactcaaatgatcttcccgcctttgccctcccaaagtgctgggattacgggcgtgagcccgtaccaccaccaccacaccgcaccaagcctcactgtgtattaaaaccaagcacaaaacactgctgtatttatacgtaaaactgttgggaatttgttgcagataattacaaaccatgacttcatggacgcaaatgtccagggggccatttttcagaagccatgtgggctgtagaaaccgtccgcatccaagtggactgcctagtcctggtgacgtccagaaacacccgacccctccacaagttcctgagacatattctagggggcagcactacccacttccaatgcactttctagaactctgcacagcctactcgccaaatctatttgtaacccccaattcaaggtccatttctgtattagtcatgctgctgataaagacatacccaagactgggtaatttataaagtaaaagaggtttaacagactcacagttccacgtggctggggtggcctccacaatcatggcagaaggcaaaaggcacatcttacatggtggcaggcaagacagaatgagagccaagcaaaaggggtttccacttataaaacctcagatctcgtgagacttattcactaccacgagaacagtatgggggaaacagcccccaagattcagttacctcccactgggtccctcgcacaacacatgggaattatgggagctacaatttcaagatgagatttggctggggacacagccaaaccatatcaatttcgatccacaaatcgtgaaaactgttctacaatgaacagctgatgatgtggctgagggattgcattggtgcatagcatcaccatgaaatcagtactcctggtgtgttcgtggtcatttacggtcctgcgtagaatggaggaaaatttgagtcaccgagtgcacactcagctcacatcagacaggggtggtgttctgccttctggtttcagttctcatactgtacagtgtcctttcctaaatagtgccatgttagtcacaaatttgcactttttgctggtgattgcactgtctcaaatgtcccctgagcacagtgctgatgtgctgtctggcatccccaaacacaagaaggctgccatgtggctttggagaaatgataaaatacgtgtgtgagatcagcttcctccaggtgcgagttacggtgctgttggcctcgagttctgtgcgaatgagtcagtagtatattaaataaggtgtctctaaaacaaaatgcacataaaacaaggtgacgaggctgggtgcagtggctcacacctgtaatctcagcactttgggaggccgaggcgggtggatcatctgaggtcaggaattcaagaccagcctggccaacatggcgaaaccccatctctactaaaaatacaaaaattagccgggtgtggtggtgtgcaccagtaatcccagctacttgggagggtgaggcaggagaatcgcttgaagttgggaggtggaggttgcagtgagccgatatggcaccactgcactccagcctgggtgacaagaatgagactccgtctcaaaaaaaaaaacaaggtgacttattgatcggttggtgaaaatgtgaccagaggtggtggtacacacccgtggtctcagccactctgggggctgaggcaggaggatcacttgagcccaagaggtcaaggctgcagtgagctatgatcgtgccactgcatacctgcctgggcaacagagcaagaccccattcaaaataattttttaagaaagaacatgaccagtgcaagtcacaagaatcgactatactttatatttcctcccttttgcacatagatagcagtaagccacacacagcattgtttgtttgcctcctgtttttcactcattgtggtagaagtctttccatatcactgtagaccttcttcattcatttccctaagtccttttaaattctacttgcattgttttacaaaatacacaacgtaagcagacactgtttaagtatcatagcgatagggcaagcctcagatataataaactcaaccggaattcaccgatctgttcacatatttcaaggcctgcccagtgtcaaagatggattcttttttttttttttgagatggagtcttgctgtgttgctcaggctggtctcaaactcctgggctcaagtgatcctcccgcctcggcctcccagagtgctgggattacaggtgtgagctatcacgcccatcccacaagtagattttaagctgaggggtggtgatataatttgccttaagctttttaagttacatgtttaaggggccagttaagaccacacatcggggtccagagccacacgtgacctctgtccttgcgtccccagccatgctgcggatggtctcagcagttctccagtttggcaacattgccttgaagagagaacggaacaccgatcaagccaccatgcctgacaacacaggtactgcccccggcctgcctgcccacgacctccagcccccgcccaggtggtgcccagccctcctgcacccctgtcccacgtagagagcatcccccttccagccacacctgtctccaacccaggatcactctgatttcctgcattttttttttttttttttttttgagatggagtctcgctctgtcacccaggctggagtgcagtggcgtgatctcagctcactgcaagctccgcctcccgggttcacaccattctcctgcctcagcctcctgagtagctgggactacaggcgcccgccaccacgcccggctaattgtttgtatttttagtagagacggagtgtcaccgtgttaaccaggatggtctcgatctcatgacctcgtgatctgcccacctcggcctcccaaagtgctgggattacaggcctgagccaccgtgcctggccgatttcctgctttttgctgagtctttgccaaaataacatcaaccactcttttcctgattctaaaagcgtgagctctgctgaaagtgaaccgcaccagcacgacagtggggaacagcaggagcccatcctcccagaccccctctccccacagggagccaccattagcatttggcgtagcttctccagcctctgcactctgcagagacacacttctttttgcctttcaagaacagaattatagtcaatatcccttactttaaaccaaaatagaaatagctatgtctctttattattataaaataatacaagctggaagggggaaaaatctggcatgacagaaaagtagaaaggaagagagaaaattacccataatcacctgtaatcccagcactttgggaggccaaggcaggcagatcacttgaggccatgagttcgagaccagcctggccaacatgacaaaacttcttctctactaaaaatacaaaaattaactgggaatggtgatgggtgcctgtagtcccagctgctcaggaggctgaggcaggagaattgcttgaacccaggaggcggaggttgcagttgagccgagattgtgccgctgcactccagcctgggcaacggagcaagaatctgtctccaaaaaaaaaaaagaagaagaaagaaagaaaaagaagaagaaagaaagaaaaagaaaaagaaagacaattacccataatcatattcccagagataattgctgctcacattttgggatgtgtctctctgggctttgttctgtgtctgtatcactgtggatatagagtgtcacagaaatggaatcgtgcttcaccccctcttcccctggagacagcaagagctttctgtcctgattatgaaatccgatgggctcatttctgaaagctgcacagcacagaaaataggaggacaggatgtattaccccactatgctgctggtaacagcattacctgaggcacctgggggctctgtacataggcacccagcaggtgtgccgtgcacacacatttactcatttgttttacaaaactggagtcagaccctgcaaactgttttgaaacctgcttttttttcccctgaatgctttcgggataacttttcaggttattcacaagaaactctactgggatcccttccctccctccctccctccctccctccctccttccctccctccttccttccttcttttagatagaactgtactgggattccctcgctccctccctcccttcctcctgccctccctccttccttcttttagatagaactctactgggattccccccctccctccctccctcccttcctttcttccttccttccttccttccctccttccttccttccttccatctttcctcttttaaatgaagtctcgcccagactggagtgcagtggcaccatctcagctcactgcaacctctacctcctgggttcaagcgattctccctgcctcagcctcccaagtatctgggattacaggcacgcaccaccatgtcgggctaatttttgtatttttagtacagacggggtttcaccatgttggccaggttggtctcaaactcctgacctcaggtgatccgcccaccttggcctcccgaagggcctccctgggattacgggcgtgagccaccgtgccccgcctccagtgtagcttttagtgactgcagaacattctttcaaatgggccaggcacctgtaatcccagctactcaggagctgaggcaggagaatcacttgaaccagggaggcggaggttgtagtgagctgagattgcatcactgcactccagtctgggtgataagagccaaactctgtctcaaacaaaacaaaacaaaacaaacaaaaaaaccatcagaacattctttcaaatgaatgaagcccgacccatctaaccaattcccgcttcttgggcactgaggttgtttcctagctttctccgattataaacaacactgcgctgaacatccttgtggcacggtctttgctcacatgcagggttattttgccagtgctggttcctggaaaaaaaatagttgggcagagaatgtacacacttttgggactcgtaatgcctctcctgggaaaggcggggcccgtcttctgctcccccaacagtgtgggaaacggtaccctctcccttgctgggcagcaagcacctcttcccagtgctgatggaatcttggtgcctctcgccctcagctgcacagaagctctgccgcctcttgggactgggggtgacggatttctcccgagccttgctcacccctcgcatcaaagttggccgagactatgtgcagaaagcccagactaaggaacaggtaggcggggctggcggtgggcaggcacagaaagagccgcgcaccccggccctgggtctttaaacagtgtatgctgtttttcccaccactcaacagacttttgctgagtgcccgctccgttaccgatcctggtctaggtgccaggcgtaaaagcagtcatcgaaacaaataaccaggccctcagggacctcaagttatagtaaggaaatggataataaaagttcaacaggatgtgtctgggagtggtggctcacacctgtaatcccagcactttgggaggccaaggtgggaggattgcttgagcccgggagtttgaggctgcagcgagctgtaattgcgccactgcactccagcctgggtgacagactgagactctgtctctaaaaaaattaaaaaatttaataataatttaaaaaaacaggatgtaaatgcaacatggtatcctagaaaaacaaaaaacaaaaacccaggatgcttttagatggtgagagcacctgtgaaggggaggttttgttggtcaggaaagtcctctctaaggaagctctaaggatgaaacattcgagatgagacctagatggttcgaggcagacggaaccgcaagtgtaaaggccctgggggtggagcaggcttggggagttgggaacattaagcaggtcagtgaggccgggtgtgggggctcatgcctgtaatcccagctctttgggaggctgaggcggacagattgagctcaggagttcaagatcagcctgggcaacatggtgaatctccgtctctactaaaatacaaaaattagctgggtatgtggcacacgcctgtagtcccagctacttgggaggctgagacacgaggatcacttgaacctaggaggcagaggttgcagtgagctgagagcacgccactgcacttcagcctgggtgacagagcgagactctgtctcaaaaaaaaaaaaaaaaagaaaagaaaaaaagaaaattgaaggaggtcaggtcagtgaggctgaagagcaagggagagagggtgggtgaatccacagtcagaaatgtcagcaaggggcagatcatgcagggtcttaggggccacagtaaggaggtgagttttattcaaactacataggaggccattgaggttttaagccagggagtgacttgattcagtttgtctttcatagaaagatccccttggctgctgcatggagaattgggttcagggatgcaggtagaggcggggagacctaaggaggctgcatccagagtcttggcaatcgtgggagctcacaccatgagcagggagggtggagtggagcgaccacaggccagggagggtttcagaatccagcttttgggcagaggcctctgctggccccaggctgggcagtgaggtacctggatgaagaccccgtgggggagatgaggagtctgggagccacactgacccgggttcaatctcagctggggtactgttgttagttcccattttacagaggagaaaactgaggcacagagaggtttattcacatgcctgaaatcacacagcccctaagtggcagagctgggattcaaacccaagttgtccggctccagagtccacgctcttaaccgctgtgcggtagaaactgctttgagggggtgagggaaggattcaagggctaacacatccgagcccgtcatgtagtacctggtgcgcagtaggacttcaggaatgtctgcctgttgttcatggcattgttcttgatggtacttacactcaaggagctgggaggcgaccttaagggggacgagctgggggcccttccccggttcacccccgacgtctttcagtctgctgatgtgcaggctgcgcccttaccatgagccctgtcccacaggctgacttcgcgctggaggccctggccaaggccacctacgagcgcctcttccgctggctggttctgcgcctcaaccgggccttggaccgcagcccccgccaaggcgcctccttcctgggcatcctggacatcgcgggctttgagatcttccaggtccacccttgtgctgggagggggatgccaacttcctcactccggtcctggtcctttctgaagccctgggtctctccccttctccctggtctctgtccccctctctctctctgagtctctgttcccccctctctctggtctctgtccccctctctctgggtctctgtcccctgtctctgggtctctgtccccttctctctctgggtctctgtcccctgtctctgggtctctgtccccctctctctctgggtctctgtcctctctctctgcatctctgtcccctgtctctgggtctctgcctctctgtctctgggtctctgtcccctgtctctggctctgtcccctgtctctgggtctctgtccccctctctctgggtctctgtccccctctctctgggtctctgtcccctctcgatgcatctctgtcccctgtctctgggtctctgtcccctgtctctgggtctctgtccctctccatcctcccagctcacgtgtcctgcgtccctgcagctgaactccttcgagcagctctgcatcaactacaccaacgagaagctgcagcagctcttcaaccacaccatgttcgtgctggagcaggaggagtaccagcgtgagggcatcccctggaccttcctcgactttggcctcgacctgcagccctgcatcgacctcatcgagcggccggtgagccccaggcccctcccagcccacactcacggttcagatccgtctctcccagcatctgcgagaccagggtctagctcctcctctgctgggcctcaggatgccccatgggttctgtggggaaggtgacagcacctgcttcctcgatcttttgtgaccataggtgattagggcccagaatgtgcctgccacagggcccggctcaaatcaatcggttaatcagagctctcaccgtaactgttgttctcacgtttgttttttgtttgtttgttttgttttgttttgtttttttcttgagacggagtctcgctctatcgcccaggctggagtgcagcggcgcgatctctgcttactgcaagcttcgccccctgggttcacgccattctcctgcctcagcctcccgagtagctgggactacaggtgcccgccaccacgcccggctaattttttgtatttttagtagagtcgggggtttcactgtgttagccaggatggtctcgatctcctgacctcgtgatctacccgcctcggcctcccaaagtgctgggattacaggcgtgagccaccgtgcctggcatctcacgtttgtttttatgtccaagtgtgacttataagagctaaaaatcagcagccacctgagtgtccaatatgtggggatctgacttactctccccctgctgtcaatggccaggccaacccccctggactcctggccctgctggatgaggagtgctggttcccgaaggccacagacaagtcgtttgtggagaaggtagcccaggagcagggcggccaccccaagttccagcggccgaggcacctgcgggatcaggccgacttcagtgttctccactacgcgggcaaggtaggggctggggccggccttggggcatgtgggagtggggatcaagggatctccactggctacagatggggggagggtgcagagggaaaacagggtcctcctgaggtccagacaaacagagcaggggctaggagagcccagggaggagcaaggattctgtctgatgggatcaccaaaaacttcctcaaagaggtgatatttgcagtgggttttgagggatgggtaggagttcatcaggaggcgatctatgtgcattttatccacttattcagcagatatgtgcggggtgccatttgtgtgcccagctcggggccgagcaaagctggatacacagatcaaacatggtttctgtcctcacaaagatccctatctgggagggaggcaaatacagacgatcaggatataaggttaataggtctttcagtggaggcagctgagggtagtgtcagagcccagaagagaagtacctgggaaagcttcacagaagagaatatgctcaatctcaaatctcagtcaagggccggcaaacattttctgtaaagggtccgatagtaaatagtttcagctttgtgggccagacgatctctgtcacagctacacaattctgctgtggtcacacaaaaagagccacagataatacataagtatcttcaagcccccagggaaaaagaaaggaaaaacagactgagaaacagtttcgagggctctcttgcccccagaagggcccccatgagtttgactatgaagacataaatgaaggttctattcctatatatatatacacatatatatatacacacatatatatatacacacatatatatatacacactacacacacacacacacacacacacacacacacacacacacacacacacatatatatatgtatttttttttatttgagacagagtctccctctgttacccaggctggagtgcagtggcacgatctcggctcactgcaatctccgcctcctaggttcaagcaattcttctgcctcagcctccccagtagctgggattacaggcacctgccaccatgcctggctaatttttgtatttttagtagagacagggtttcaccatgttggccaggctgctctcgaactcctgacctcagttgatccacccgcataggcctcccaaagtgctgggattacaggtgtgagccaccgcgcccagccctattccagtgaaagtatttgcaaaaagaggtggcaggctggattttgcctgtgagccatagtttgctgacccctggttttgatgatgtggaccaggcagccccagaggatgggtgaagggtgggaagggctctccaggcagagggaacagcatagacaatggctgggaggcaggagattccatgtgttctgtgtctagccctcagtttcttccccagacatactccagaactccccctgtacccagccctctgctaggccgtgagtcagacctgggccctgccctcgggggaccgctgtctggtggggggcacatatgcagagaattgtagcggccaagatcgtgactctatggagccccacagcaaagccctgagtacccagaaggagccagtggtgtgaaacccacagagacagaaccccaggtggcaggaaccgcaggggtaaaaccccgaggtgggagtaagctcgcatgtttgaggaacagtgcggaggccagggtggctggagcggaatgaataggaagaaagtggtggtggtggaggtcacagaggtggcagggggcatagaggggaaggagagagaggggaccatgctggtggggtgcagttcagaatatggacacaaggtggcaccagtgctcgcttgtccatggtgagctccagacctgggagtctcagagcttctggaaggctccttaggaaatccagagaatgtctgagcctgcaagtcatcgccctcctctacctgacttcattcaggtcgactacaaggccaacgagtggctgatgaaaaacatggaccctctgaatgacaacgtcgcagccttgctccaccagagcacagaccggctgacggcagagatctggaaagacggtgaggacccacttcccccaccccggctctaggggtctgtgcggccattctccaaatccacagcgtgagcacctttgtttcagaggcggaggtctgaacctgagttttctgctcagacccagaatagccagtgtcacaaatagtatttcaaatcagtgatggatggatccatagattaattgattgactattgatttgattgataagccagcatccttctcaaggataaagcactccgccttaatcagaaacgtggcaaagatacccactaacactactgttaaacatcgtttttttagcaatactagcctatgcaatcagaccagaaaaagtatgaatatcgaacaggaagaagtaaacttattatttttagatggcctgtgttccctaaacaattaggagatttggctgggcatggtggctcacacctgtaatcccagcacttttgggaggccaaggtgggcggatcacttgaggtcaggagttcaagaccagcctggccaacatggtgaaaccctgtctctactaaaagtacaacaattagccagatgtcctggtgcatgcctgtagtctcagctactagggaggctgaggcaggagaatcgcttgaatctgggaggtagaggtttcagtgagccaagattgtgtcactgcaatccagcctgggtgacagtgtgagactctgtcccaaaaaaaaaaaaaaaattctactgagaaataatttataacaataagagaacacagaatgatgatcttttgcaggtcagtcaacttttaggctttgctttctttgttttcttacaaagttcccttcacgcccccagggaagaagaaagaaaaaacagactgagatacagttttggagggctttcctgcccccaaaaggcccccatgagtgtgactgtctttttggattgacacttctaggggtcataggcagagatgccaaatgccctgtggtaggactctgaccttttccaagccttttctgccactgcccctgcccccccatccttagaggaggtttgagaaatggttttagaaagctggcagaactggcatcctgttttttccaggttccaagtttctggcatttgtcagtttgccttaatcttttattgacatgaaaaggtagctgtagaaataccagtccatgcaatttggcaagaaaacaaaatgagcggccaggcgcggtggctcacgcctgtaatcccagcactttgggaggccaaggtggacgggtcacctgaggtcgggagtttgagaccagcctgaccaacatggagaaacctcatctctactaaaaatacaaaattagctgggcgtggtggcacatgcctgtaatcccagctactcggggggctgaggcaggggaatcgcttgaacccgggaggtggaggttgtggtgagccgagatcgtgccattgcactccagcctgggcaacaagagtgaaactctgtctcaaaaaaaaaaaaaaaggaaaaaaaaagaaaacaaaatgagcaaggtgagtggttcccaaaacacactcacagagcaaaacagcatggagggtcttgatcttgtgagctcatgctagaaagatagattttatttttatgtctcatatagtatttacacaaggagattggaaagcagagtttgatgttcaggaacagaaccagattatgctacgagaatcatctcccggctgaaaatctgctgcccttttaaaatatttgtgctgtcttcataaacacatgattctccacagtgagccctcatttgtcacactctgtgtgtgcctgactctcagagggttccaaaagaaaaagtggaagctgcaaaacctcctggctcagcctcccgagtagctggggagctgccataatgtcacttcctccataatcctcctaaacaaagctagtcacaaggtcttcccagattcaaggagctgcaagacacaggcaaagggtgtcaatacaggggaaagtggggaatcggggccatttttgcccaatctctgctagagctgctttgagcccagaattggatgcccagcatcctgacagcccagggaaaaacggaaatgagattagctctcctctgagaggcaaaaacaacaagtggcctgggagcatcaagttcattcttgagcttcctggcagccagagcaaaaagggcaacctactaaaacagacacaacctctagagggagagattttttattctttgcactgaattcttacagaggacattcgtccttttggccaacagtgtgtggatacaaagatgaacaggagttcagaagtttatggccaacattctggttttccatcttgctttgctctgtactgttgactaataaccctctcctctttttcttcctgccacctcctctccttcccctcttttcatgcatctctctccgccatctctctgccatctcccctccacccacccacacatctgtcctcactccccagaacatgggggcttccagcagttctctttccttggctccttcccaccgtcgcccccaggatctgcagagaggtgcagctctgctatttctccgccagggggtgggtgtctctgtgcatcgatgggtgaggcttgctggaggaggagggtggacctgttgggctggggacctggttttgaacatctgtcccctctcctcttactgtggaggtctctcactcttcctttccctccttgttggctcccttggaagtttccagactctgtagcagcagaaccccttcttctaactaaactgcatgtaaaagtacaaacaagcgtgatagtaccagctcgcgtttcttgagcacttactatgtgccgttcaccatgtgaaacccctttagaattatcaacaccccattacacaaatgaggaaactaaagcacagagaagttaagtaacttgctgaggtcacacagccagtaagtggcagagctgggatttgaacccaggacatcagattccagaactttagttcttatctgtgctatgaggacttaataaatgataattatcattttgaaaatgacagggagtacggggtaggggagacggttgaacctggggaagaaaataacatatttgagcccctgccatgacctggccctgccctaagcacagattatctagttgacggttgatggcgcttgaatgggatgagttttgcaggacatcagattctgccctagctgtgggttcctgaggaacctggcatgattcaacacatagaatttgggaccaggtgcattggctcacccctataatcccagcgctttgggaggccgaggtgagaggatcacttgaggacaagagtttgagattagcctgagcaacacaggaagaccccgtctctacaaaataaatttaaaaattggtgggcatggtggtgtgcgcctgtagtccaaactacttgggaggctgaggtaggaagatcacttgagcctaggaggttgaggctgcagtgagctgtgatcactccactgtactccagcctgggtgacagtgagactgtgtctcagaaaacaaacaaacaacagaattcgagacagtgccaatagaaggaatggatatttttcactacccaaagcagcaccgccaagcggcactagagaaaatagaatctttttgttgagacagagtctagctctgttgctcaggctggagtgcagtgacacaatcttggctcacggcaacctctgcctcccaggttcaagtaattctcctgcctcagccttccaagtagctgggattacaggcatgtgccaccacacctggcttaattttttgtatttttagtagagatggggtttcaccatgttggccaggctggcctcgaactcctgaccttaggtgatccacccgccttggcctcccaaagtgctgagattacaggcatgagccaccgcaccctgccaagaaaatagaacctctatgaaattaggctcttctggaaaaatggttaaaatagagacagtttgccctatttcaaatattgcatataatgcaagaatttattacatcttttaatatgtttcagattcctaaaatgcaactgcagtggttatgttatcactgttttctctctctatgcctcagtttccaaatctgtaaaatgggaatgattcttacaggcttataaagccattgatgtaaattgctttgagcaatgcctgccagagtatctatgctaggtaagcatttgctgttattgtcatcatttattgataaggaaaacagagatcatgtccttgaagagaagaagggtcaaagaccagagtttgagaggactcctactgtctgagttctaatctcggatcttcagtttctaagctgtgtgaccttaagcacattctcccactcttcagagcctcagtatgtccatctgtccaatgaagctgatatctaccttacaggctgtgtgaggtccttcatatgtaaagtgccagttgtgataaatgataagacccttgacctttggcccaggtccctaaaactgaccctgacctccttctctctctctctgcatctccatctgacagtggagggcatcgtggggctggaacaggtgagcagcctgggcgacggcccaccaggtggccgcccccgtcggggtatgttccggacagtgggacagctctacaaggagtccctgagccgcctcatggccacactcagcaacaccaaccccagttttgtccgctgcattgtccccaaccacgagaagagggtgagtgactcagcctggggaggaaggggtggctgtggctgtgggttaaggtttggcctctggacttggctggagccacatctgattcgaggaccctcaaattagctgtgtggctttgagcaaattgcttctattcctaggctcagggtccggttgggaaaattcatgcattcatatgacttaatgtattaagcatctactgtgctgggaacaggtactggggaggcattggagagaaaggcacagccaactcctgttctcagggagctcacagtctgatggggagcatagacattcatctaaccatccaaaatgaacgtccagttaaatctgtaggggtggtgagtatcacacagggcttgatctggtcagtgaagttagggaaggttccctgggggacgtgatgactgagccctgaaggatacgtgatattccaggcagagaagagtttgtacaaaggcccaatggtaggttggagcacgcgaggtacaagggatagaggaaggccatcagggctgggcttgttgcatgggtgtgacaagaccatggccagcctcactggccactgattttcatgttgagaaaatcagagaatgggccctacagagaagggtcaatgggaatggaaaacaacatgtttgccatgttgcccaggctgctctcgaactcctgagctcaagcgatccacccgccttggcctcccaaagtgctgggattacaggcgtgagccaccacgcccagcctgagatcccatattttatcaaatctaagccatgtattcctccccactagcgtctctgaagtcgagatgtagcttagtcaacggcctgtcagggtttaattaccagtctttttcctttcttggtggcatatttaacgacagcgtgtgccactggaatttttgtactgtttagatttttgccatttgtgcattactgttgaaaagagaaaaggcggcctggcacggtggctcatgcctgtaatcccagcactttgggaggctgaggtgggaggactgcttgagcccaggagttcaagaccagcctgggcaatggcgaaacgccgtctctactcaaaatacaaaaattagctgggcatagtggtgtgcacctataatcccagctactcaggaggctgaggcaggagaagctcttgaacctgggaggcggaggttgcagtgagctgagatcatgccattgcactccagcctgggcaacagagcaagactctgtctcaaaaaaaaaaaaaaaaaaaaaaacgaacaaacaaacaaacaaaaaccaaaaaaacatgatttaccagctttggacagacatcagcttcccaggaggccttttggcgactctcttgcgtgcaaattcagccccacccacatccctccctgcggatcttttctccttagcacttagtatttcttctttattagtgactgcttcacctagggtatttctagtttctcctactgaactctcagttccccagggcaggatttccccctggtttgagcattgctgtcttcccagggcctagaaccgttcctaggcacctagtaggtgctcagtaaattacatgtggaaacaggaaattgccaagcttgaccgtttggcgcccccgtgtggccgccgctgacccccgcgtgtccgtccgctctccccaggccgggaagctggagccacggctggtgctggaccagcttcgctgcaacggggtcctggagggcatccgcatctgtcgccagggcttccccaaccgcatcctcttccaggagttccggcagcggtgagctagagcgagggcccaggcccggcggaggggctgggtgggacccgggtctggaagccgacacacctgcattcaggtctccacccactcttgttccttctgcgctggggaagttgaggcagattactcactttgctgagcctcagtttactcgtctgtgtatgggagaacaatagcccacttgatgcactcctgagagaaagcacacagagtctatggggatctggggtacattgctgctgctgtttagggcagtaggccccaaactatgaacgtgaaatcactgcatggtgttacaaatctgcatgtctttaaaaatgaagtagaaggcggggcgcggtggctcacgcctgtaatcccagcactttgggaggccgaggcagacagatcacctgaggtcggaagttcgagaccagcctgaccaacgtggagaaaccccatctctactaaaaatacaaaattagccgggtgtggtagcacatgcctgtaatcccagctactcgggaggctgaggcaggagaatcacttgaaccgggaagggggaggttgcagtgagccgagattgcgccattgcactccagcctgggcaacaagagcaaaactctgtctcaaaaaaataaataagtaaataaagaagtagaataggacagaatagaaaataccaaggcctaatgagcaagtaatacagcaaatgtaacaaaaatgatgcttcacacaagctgtgtagagcagcaccgtcccttagaagtagaatgggaagccttgtacacaattgaacattttctaatagctacacttttacaagtgaaaaaaatgaaattaattttaacaagatattttactaaagccaatacatccaaaatactggccaatactggctgggcactgtggctcatgcctgtaaccccagcactttgggaggccgaggcgggtggatcacttcaggtcaggagttcaagacagcctggccatcatggagaaaccccatctctactaaaaatacaaaaattagctgggcatggtggcacatgcctgaatcccagctacctggtaggctgaggcaagagaatcgcttgaacctgggaggcggaggtcgcagtgaggcaagatctgaccactgcactccagcctgggcgacagagcgagactctgtctcaaaaaacaaacaaaacaaaaaactgaaacagtcgatcattgtcgatgttgctgtccttggtggtggcgtgaatgctcagatgtgagttttgtgactgtccttgttattgtcactgttgttcctgctgtgtgtcactctgagcccagtgcctggcccgcagcaggcactaggtgagcgtttgctgtaactctctcctccccacccctccctgctcattgcagatacgagatcctgacacccaatgccatccccaagggcttcatggatgggaagcaggcctgtgaaaagatggtgagtggggcagagcctggaatgcgtgtgtgcgtgtgtgtgtgtgcgtgcatgagtgtgcgtgcatgtgtgtgtgcatgcatatgtgtgcatgcgtgtgtgtgcaagtgtgtgtgcatgcacgtgtgtgcgtgtgtgtgtgcatgcatatgtgtgcatgcgtgtgtgtgcatgtgtgtgtgtgcatgcgtttgtgtgcaggggcccaggtggtcggggagtggggctgggatctccccttcattgaccttcctcattacctctccctatcaccgcccccacccccgcttcctcatcatcccctatcacccccctccccgtcaccccatcaccccctccccatcaccactcccccatcgccccctccctataactcttctcccctatcaccctcctccacatcaccccctcccccatcaccccctctccccaatcaccaccccctcccaatcactgcccctcctcaccacccccccatcatcccctgccccatcacccccttcctataactcccctcccctatcactcttcacatcaccccctcccctatcactctcctcatcaccccctccccatcacttctcccccatcacctccctcccccatcaccccctcccccattaccccctctccccaatcaccaccccttccctatcactccccctcctcgccaccccctcccccattactccccctcctcaccacccccactcccccatcaccccctctccgtcatcacccctctcccacccctcacagatccaggcgctggaactggaccccaacctctaccgcgtgggacagagcaagatcttcttccgggctggggtcctggcccagctggaagaggagcgagacctgaaggtcaccgacatcatcgtctccttccaggcagctgcccggggatacctggctcgcaggtgggcagccacgctgtctcccggggtcctgttggccgagactgggtcagggaggggttgaccagatggctctaggtgtcagggcctccaggatgggtgcagggctgaggagcaggtggatggaggtgccgggtgtccaggcttcttggttctgcagtccctgaggggccctgtgggcagggcaggccctgttcagagtaagactggcaacacagaggctggacttagccgcagggtgaccagctgtcctagtgggcctgggtctgggtttcccagggtgcaggacttccagtgctaaaacagagaaagcccggggcaacccaggtcaagctgtccgctctccctggccagtccctcgaggggctccagtctggaggtgagacttccatgggcatagagtcccagtcccgggtgagacctgctttgatgggggccatagaggtgcagcaaggaggccctgctgcaggccatgactcccccaggccacaccggacaagcaggtggatgaaggaaaatgggaaaggtgatcagggcaggagcaagcttgtgcaaagacccaacgatgcaagatcctggcacgcttcaggaatacagggagtttgcgggagagtctccttcctccttagaagtggctcagagaggccgggcacggtggctcacacctgtaatcccagcacattgggaggccaaggcgggcggatcacttgaggtcaggagttcgagacaagcctggccaacatggtgaaaccccatctctactaaaaatacaaaaattagccgtaatcccagctactcaggaggccaaggcaggagaatggcttgaactcgggaagcagagactgcagtgagccaagatcatgtcactgcactccagcctgggtggcagagtgagactctgtatcaaaaaaaaaaaaaaagctgaaagaatagagtggcaggaaaggatggcccaaacaccaggctgagtggggccttgtccagaggagctagggagccatggagggctgtgagcaggggaggggtgggtcagctctgggtgtagaaagactctctggaggcgtgttgggatgggctgataggagaggctggagaaggaggccaggcagaggatccaggcaagggagggtggggcctgaactgcggctggggctttgggactgggcagagagagtcgggagcagggggacgaacggccagaacacagtgagatctcaaagtaataagagtgcctgcacacagtaggcattttatgatggctgactaagtgaaaggagcttggcttggtcaggcatggtggcccacccctgtaatctcagcactttgggaggccgaggtgagtagatcacttgaggtggggagttggagagcagcccggccaacatggcaaaaccccatctctactaaaaatacaaaaattagccgagtgttgtggcacgcacctgtaatcctagctacttgggaggtgaggcaggagaattgcttgaacctgggaggtggaggttgcagtgagcccagatcatgccattgcactccagcctaggcaacagagcaagactctgtctcagaaaaacaaacaaacaaacaaagaaaataaataagaaaggagcttggctctcttgctaaggggatggcgcctggaggctcccactctgcccctcacccatttccccacccagggccttccagaagcgccagcagcagcagagcgccctgagggtgatgcagcggaactgcgcggcctacctcaagctgagacactggcagtggtggcggctgtttaccaaggtgagggcagcctggggaggtggccccagtagggagaggatagggccttggggcttggtctgcttgacaagtgacttcctccatgtgggcctcagttttctgcatcactaaaatggggccagtcggcccaggctttgctagctgggattctttagttagcaagcaacaagaaaaatctgactcgaaccaacatggatcaaagattcaagacaatgtgggctgcacctggatccaggggtccccaagacttctgttcaaggatttgctggaaggactcacagaacttagaaaagctgctgtactcacagctacagtttatcacaatacaaagatacagattgaaaacagcaaaggtgctgggtgctgtggctcacacctgtaatcccagcagtgtgagaggccgaggcgggcggatcacttgagatcaggagttcgagaccagcctggccaatatggggaaatcctgtctctactaaagatacaaaaattagctgggcatggtggcaggtgcctgtagtcccagctacttgggaggctgaggcaggagaatcactcaaacctaggaggtggaggttgcagtgagccaagatagtgtcactacatgtagcctgggcaatacagcaaaactctgtctcaaaaaaaaaaaaaaaaaaaaagagcaaaggttaaaaaaaaaaaaaaagtacataagtgtctcggagagaccaagcatgagcctacagctgctctctcccagtgaagttctgtggacaacacttagctgttcccagcaatgaagtatgataatatgcacggagtattgccaaccagggaagctcacctgagccttgatgtccagcgtttttcctggggctggtcacacaggcatggacaaggtcacacacatggtgacctcagttactcagtctccagcccctccagagtcaaactgatgccatgtggcccagggcccccaccacagatcccatcgttagcatagactatccagggtggcccaaggccccaggtaaaccaagacactcttatcagatgggacattctaaggacttagaggtaacctcccaggagcccatcaagggccagacttttcttaggaatgtgtggggtttggacaacccaggtctgctgagttaaccctttactgcacaagggtccaaacagtgacgtcagtatgcagtgttctgcgtctcccgcttggctttcctccgtgatgatcaccaacagaggctttccacacaggggccaccagcagatggagtcttgcccctaacaaccttggccagcctggtctctcttatcatagagctccagccagattcccaggtttcatgctcattggcccagctggagtcatgtgaccatcccagagccagttagtagggatcagatgagccaggctggcatcacatgcctacccaaagcagagggtgccaagccaggtcgccatgcaccatggagctcagggactaggtgttcccccagggggaaattggaaaggaatgagaaggatggaggttttgggggcagtaatgtaattctgaatacgatgtctgagagatcagcctgcattcccttggtcagtgttaactgagcacctactatgtgcccagaacttttatagaggctggggtaaatggtgattaaaaagagacaaggtcctgccaccatggagctcacagtctgggacaagagttgctgcactgcggcctgtgggccagatggctgtttttgcaaaagccctttcgttagcatggtgtctgcagctgcatctgagctacagcagctgagtggagtaggtaaacagccagaagctgaggttaggggctcacacctgtaatcccagcacttcgggaggccaaggcaggagcatcacttgagcccaagagttcaagaccagcctgggcaacaaagtgagaccctcatctctacaaaaaaaaaaaaaacaaaaacaaaaactgggtgtagtggtgcacacctgtagtcccagctacttgggacgaaggattgcttaagcccaggagtatgaggctacagtaagccatgatcgcatcactgcactacagcttgggtgacaagagtgagaccctgtcttgaaaaaataaatcaaaattaaaaactggccaggcacggaggcgtatgcctgtaatcccagcagtttgggaggctgaggcaggtggatcacttcaggtcaggggtttgagcccagcctggccaatatgatggaaccctgtcactactaaaaatacaaaaattagctggatgtggtgtcaggcacctgtaatcccagctactcaggaggctgaggcaggtgaatcgcttgaacttggaaggtgaaggttgcagtgagccaagatcgcaccactgcactccagcctgggtgacagagtgagactctgtctcaaaataaataaataaataaaaataaaaattaataataaataaaaaacagccagggtggcctgtaaaatctcaaatatttcctgcctggcccttgaagaaaaagtttgcctaccttaggtgttgggggttggggtcaagtaggatttgattggcatcatttgagaaatgtgaatgatacctgcgaaagatgcaaggagtcggggcagaaaaggagagaatagaagggatacagaattgggtggagaggaaaagaatcaagtagacttgtgtagaacggagtagaatatgattgaacagaaattatcagagcagatctcacttagcaagggcgacgaggttttgtgaaatttttgtttcagttctgtgtgtacctctgtcactgcagcctgaatcatgccatgtaaagctcatctctcactaaggaccttggactaacaggcttaagaaacactggcctttggccaggcatggtggctcatgcctatatcccaacactttgggaggctgaggtgggtggattacttgaggccgggagttggagaccagcctggccaacatagcgaaaccctctctactgaaagcacaaaaattagccggacgtggtggcatacgcctgtaatcccagctactcgggaggctgaggcaggagaatcgcttgaacctgggaggcagaggttgcagtgagccgagatcccaccactgcactccagcctgggcgagagagcaagactctgtcgaaaggaaggaaggaagggaggaaaaaaggaaggaaggaaggactgttccacagaatagcagcagccacagtacacagtgtctcttggatgtggaaggatcctttagccagagagattagatagatcaatagtgtatttagtggtgcttgcctgtacctgtcagtgttctaggcctgtgaccagggactgttgccaaggcggggacacacagctaataggtggaggagaagggatttgaacccagaaactcaaaccccactaagagtgtgaggtcttggcgcctgaagtcagccattccacccctttcacctccacctaggtgaagccactgctgcaggtgacgcggcaggatgaggtgctgcaggcacgggcccaggagctgcagaaagtgcaggagctacagcagcagagcgcccgcgaagttggggagctccagggccgagtggcacaggtgagggggcgggggcagggcgtgggggcgtgtcttcggggtggggctgtgtcgcatgggtggagccaggtgtgaggggcggggcttccggctgagccagcctgtgcccaggcagggctgtcgggaggatgggagcaaagctaaggtgtactgaggccgggcggggattggggctgtttagtttggttgagtcgtgacgtacagggagcagggccctgggggtgtagccagggtatgggccgggtaggggtggggtgggagagtcctgcagagccagaatggagctgggctgtaggatctgggggcaggggcctcagctgtggccgggctatggtatgcaggtggcgaacttataactgtttccagtatttcagctatcttaaaataatgctagaacatttgggaggctgacgcgggcagatcacctgaggtcaggagttcaagaccactctggccaacatggtgaaaccccgtctctactaaaaatgcaaaaattagccgggtgtgatggcgcacgcctgtaatcccagctactctgggaggtggaggttgcagtgagccgagatggcgccaccgcactccagcctggtcggcagagtgagactctgtctcaaaaataataataataataataataatgctagaacaaaccccttcttgagcatttttctgtttgccttttctgcattatttcctgtggttacattttaggtatgaaatgtattaaatgaaatgtgaggtagtagaaagacccctcgggggttatttgaaggatggactggaaggggaaaggctagagtctgggaggctggggaggaggctggagagagacaggtgagagaaggaaagacctgagcctgttggggctgtagggacagagaggaggggccagagagagcaggggtgcagactgatggctgtgagaggtgagggagggcatccccaggattctgacttagtgattagggggatgtgggctcatcctgagatggggacctgagggggaggaggtggggacaccgtgtcctcctgcccctcagtcctgccctggagaacttaaaggccaaagcaagttacaaggcagtaggcacccagtgcaggttgccctgggagcactgcctgctgaccactaacctcccacacactccccagctggaagaggagcgcgcccgcctggcagagcaattgcgagcagaggcagaactgtgtgcagaggccgaggagacgcgggggaggctggcagcccgcaagcaggagctggagctggtggtgtcagagctggaggctcgcgtgggcgaggaggaggagtgcagccgtcaaatgcaaaccgagaagaagaggctgcagcagcacatacaggtctggccccttgcatgcccaccaggccaccctccagacccctctgtctacaccatccacctttgcttctacaaaccgtgtgtctttgggccatgaatttgtagaaaactcagttctaagtgaatttgcaaaaagaatacatttttgattcagatcgcgggagaccttaaaatgtgtgagcttcacctatggatggatccaggcatccaagtgatatgttcagcttcaggcctggctggatccaggtgtctgagtgatttcctcagcttcaggcatggctggatgcaggaatccaagtgatatcctcagcttcaggcatggctggatccaggcgcctaagtgatgtcctcagcttcaggcatggctggatccaggcatccaagtgatatcctcagcttcaggcatggctggatccaggtgcccaagtgatgtccttagcttcaggcatggctggatccaggcattcaggcaatgttctcagtactccccctctctccgtctcctggctgcattcacgggcaggctgccctcatggttccccttcaaaatctagtgtgtattttacactacagcacatctcaattcagatgctaaattttcattggaaatacttgatctgtatttctatttcataatttctgcagtttataaaaactagattcacatggccaagttgttccaaacatgcttaaaagcttttcagtgattgggtgtctggttttaaatttaaaataaataaaattaaataagacagaaaatttagttcatcagtccacatcagccacatttcaaaagctcagtaatgtttttttgttttttgtttttttgagtcagagtcttgctctgtcgcccaggctggagtgcagtggcaccatctcagctcactgcaacctccgtctcccgggctcaagcaattctcctgcctcagcctctacagcagtatctgggattacaggtgtgtgccaccatgcccagctaatgtttttttatttttagtagagacagggtttcagtatgttggccaggctggtctcgaactcctgacctcaggtgatccgcccacctcagccttccaaggtgctgggattacaggcgtgagccaccatgcccggcccagtagtgttttaatcaacttctcttgatccctttggtgagggagggaccctaccctaggtttatggggatggctgagcacacagcactgggcaccagacaggtgaggggggccgacatcacaccacagacggccacatggatgttgccctcaagagcagagtgaacaagcaggggctgtgggaaacaggctttgtcacaacaacaggtggaggtgacccctgggtgccgtgggaaaatgtgtttggtttgtttcagtaattccatgggctggcagggagctggaatgtgcttctcagggataagcaggcactgtgcctggtccccaggataaggagggtccccagataaggctgggggaccttatctatgggagcagagggagtaggaggacttctgtttaggccatttgaggcccctgctacttttagcaaatgtcaaggcagcacataaaattgagtcttggctaggtgcagtggctcaatgtgtaatcccggcactttgggaggatctcttaagcccagaggttcaagaccagcctaggcaatgaagtgaaaccctttctctacaaaaacaaaaacacaaaaattagccaggcatggtgtcacacacctgtggtgttgtcacactacccacgaggcctgaggtgggaggatcacctgagcccaggaggtcaaggctgcagtgagctgtgatggcaccactgcactccagcctggatgacagagtgagacctttctcaaacagaataaaataggctgggcgcaatggctcactcctgtaatcccaatactttgggaggccgaggttggtggatcacctgaagttaggagttcaaggccagtctggccaacatggtgaaaccccatctctactaaaaatacaaaaaattagccaggtgtggtagcgggtgcctgtaatcccagctactcgagaggctgaggcaggaaagtcacttgaaccccgggaggtggagattgcagtgagccaagactgcaccattgcactccagcctgggcaacaagagcaaaactccgtctcaaaaaaaaaaaaaaaagaaaagaaaaaaatttaaacagaataaaataaaataaattcaaaaaataaaattgagtcttgatttccagtgtgcccaatgactgtcatgttggcagtacccatttctataatttgtgtatttactatgtttattttatttttaaaattatttattatttatttattttttttttgagacagagtctcactctgttgcccaggctggagtgcagtggcgcgatttcagctcactgcaagctctgcctcctgggttcacgccattctcctgcctcagcctccagagtagctgggactacaggcacccgccaccacgcccggctaattttttgtatttttagtagagatggggtttcaccgtgttagccaggatggtctcgatctgctgacctcgtgatccgcctgccttggcctcccaaagtcctgggattacaggcgtgagccactgcgcctgacctatttactatgtttatagtttataatctgtacccctaacccccacacaagaatgtgatttccacaaggataggtgttccttttttttttcagaggcaagatctcgctctgttacccagacttcagtgcagtggtgcggtcatctctcactgcagaaggacagtcacttttacccatcctcagtgcctagaaccgtgcctggcatacactaggcactcaataaatgcttgttgcgctaatgaatgaaatgggaaagccaataagagtttgatccttcccggcctcacccagggcatggacatctctgaaccacaagccgcggggatccgtgggccagccatccccgctcccatccttccccatcacactccatctattggcccagtatcctcactcctcctgccttcccaccccaggagctagaggcccaccttgaggctgaggagggtgcgcggcagaagctgcagctggagaaggtgacgacagaggcaaaaatgaagaaatttgaagaggacctgctgctcctggaagaccagaattccaagctgagcaaggttgggggcctgagggcagctgggaaagtggggatggggtgcattggtgggttaatgaatggtgaacttcacgccatgggggttaccacactgcggttctcaggtgtgcaccggtgggggtgggatgggtctatagccccaagggaatgggaaggagagggaggtgtagggggaggaaggtcagagaagggtgaaaaggagcagaaacatagatgagaacaacaccagaagctgcagatcaggtaagggctgctcctggcccaactcctcctgactgccccccatcccactccacccctcaggagcggaagctgctggaagatcgtctggccgagttctcatcccaggcagctgaggaggaggagaaggtcaagagcctcaataagctacggctcaaatatgaggccacaatcgcagacatggagggtgagctcccgcccagccagtaggggtctgtgtgtgctctaatgggggacctcaggcaagccccatgtgctacagggcctcagtggctgtgtctgctaaatgggataggaaggaaggctcagggcagattgagtgtcctcccagctcttgagttcttaatgcatctctaaatccaactctctttctctccttggtgtcttgggttgtcctcctttcttcccatctgactgtcccactgtctgtctgtttcagacatgtttttgtctccctgtcccttcctgttgacttagaatcagaaacagaagggaaggggcacagggaggaggcagggctgtagacacagggcagagagagtcagagggtggaggcatgggctgttggtggggatgaggaggagaggacagtgcgtctaggacaacattgtgggaagagtccctgagatagatggggaaggtgggaggaggagaaggcgttaagggaggtgctgagcttagccttatatgtgactggggacctgtggtctctgtgagagcggctgagtgtgcaggcctggagtcctcatgcacggcccccacccctgcctccagaccgcctacggaaggaggagaagggtcgccaggagctggagaagctgaagcggaggctggatggggagagctcagagctgcaggagcagatggtggagcagcaacagcgggcagaggagctgcgggcccagctgggccggaaggaggaggagctgcaggctgccctggccaggtgcagggtggggtgggcttggtggggtaagcagcatgggtgcacggccagccagcgtggggtgcccaagtcagaagctcctgggtacaaaccccagtggagccactcaccagccacagacaggccacatcccctccgagcctcagtgtccccttctgtcaaatgaagatagcaagagttccaggcccactaggttaagggaaaagtgaaacaagactctatgtgtctggtaacttgcataacagtgcacaatgggaacaagaaaatgctatttctaggccaagtacgatggctcacacctgtaatcccagtactttgggaggccaaggcaggtggatcacttgaggtcaggagtttgaaaccagcctggctaacatggcaaaaccctgtctctactaaaaatacaaaagttagctgggtgtggtggcgggcgcctgtaatcccagctactcaggagacttaagcacgagaattgcttgaacccaggaggcagaggttgcagtgagccgagatcacaccactgcactctagcctgggcaacagagcaagactatgtctcaaaaaaaaaaaaaaaaaaaaaaaaaagagctatttcttcctcttccctgcttggcctccccacaccaaacagcccagaatcagctgagatttgccaagtggcctatgttaggaatcataataattatatttacactcgttcacagtaattgagctcctactgtatgccaaatgtggtgcttagtgtttcaaatgctttttatgcactgtgcttcatgcaatctaagacccacttgattacaagtacagctccatttcggagatgttaaaatgtgaaaaactgtgcatcttagagttgatggaacatggggggtgtgtgtgtgtgtgtgtgtgtgtgtgtgtggttaagaacacgtctttgttttgttttgaaacggagtcttgccctgtttcccaggctggagtgcaatggtgtgatttcggctcactgcaacctctgcctcccaggttcaagcaattcttgtacttcagcctcccaagtagctgggattacaggtgcccgccaacaagctaattttcgtatttttagtagagacgggctttcaccatgttgcccaggctggtctggaactcccaacctcaggtgatccattcgctgaggttaggattataggcgtgaggcactgcacccggccgtgaacacacatctttgagtctgacttctgggttggaatcctggcttctcccctttctagtcatgtgacctcatgcaaatcacatcacctctctagcctcagttttttcatctataaaatggggtaattgtagacagtactcctaaggttagtgtgagggttaaagaagaaagtgctcctcagacacttcgcataccctgagccctcaataaatgccggatgtttctgttactactttattactcttgttaatttttttcttttttactgaggtgaaattcacataaaagtaaccattttttaaatgtacaattcagtagattttgcccattcacaatgctgtgtaaccatcacctctatctagttctagaacattttctcttttattgagctggagtcttgccctgtcgcccaggctggagtgcagtggcatgatcttgcctcactacatcctccgcctcttgggttcaagcaattctcctgcctcagcctcccgagtggctgggactacaggtgcccaccaccacacccagctaatttttgtatttttagcagagacggggtttcactatgttggccaggctggtctcaaactcctgacctcaggtgatccacctgccttggcctcccaaagtgctgggattacaggcatgagccactgtgctggcctccagaacttttttatcacccccaaaaggaaaccctgtatgtattaaccaatcacagccaggcacagtgactcacgccataatccagcactctgagagtaggaggcaggagggtcgcctgagcccaggaattcaagaccagcctgggcaatataatgagaccctgtctctacaaaaaacttttaaaaattagccaagcatggtggcatgtgcctgtagtctcagctacttagaggactgaggtgggaggatcctttgaacctgggaagtcgaggctgcagtgagctatgattgtgccactgcactctggtctaggtgacagaacgagaccctctctctcaaaaaaaaaaaaaaaaagaaagcagccactccccatccctccttctccccagcctggcagcctctgatccactttctgtctaaatagaatttgcctattctagatatttcatacaacatgtggccttttgtgctttagttatttttatcgccatctccccagcaaccctggtaaaggggagtgttcatcgtcatgtcctcccacaaatcaggaccctgcccttcttaagtcacttgttggagcagggggccaggagaggatactaagccaggcctgtgtggctcctgaaccattaacccccaggtcccagttggtgctgcccccagatccagcttctctttgcaatgacgctgtgtgaagggacaggaagccacatccctgtgagagctgtaaggagggactccgggccaacccagccactcacggacccggtaacctcggcaagtgctttctccacgctagacctcagtttcctcatttggcaggaacattaaatgaggtgatacaagtaaagcactggcatgaggcaggaacttactaagtgtctcctacgattactgttgctgtcattcccactttacagctaagaaaactgaggttcgaaatgagtcaggctgggcgaagtggctcactcctgcaatcccagcactttgtaaggccgaggtgggaggatgacttgaggccaggagttcgagaccagccctaggcaacataggcagaccttgtctctttggggaaaaaagattagccaggcatagtggaccgcacctgtggtctcagctacacgggatgctgtggtaggaggatcacttgagcccaggaatttgaggctgcagtgagccgtgactgcaccactgcactccagcatgggcagcagagcgagaccctgtctcagaaaacttaaattagtactgcagccaagtgcccagtggcagagagaggattctaacctgggactggccactcccaaagcccacatccagcctctcagtccccagaaatcattgcctcactctggcctgcccctgtatcaactccacggttcttgtcacccccagggcagaagacgagggtggggcccgggcccagctgctgaaatccctgcgggaggctcaagcagccctggccgaggcccaggaggacctggagtctgagcgtgtggccaggaccaaggcggagaagcagcgccgggacctgggcgaggagctggaggcgctgcggggcgagctggaggacacgctggactccaccaacgcacagcaggagctccggtgaggcccggtggcaggccgctgtcacagcctgtgcacatacagggctgggggaaggacttaggtacaaagtctctgtctatacagaggcttacttattgtacagttgttcatgaaccaccggctctaggtccggcctgggtcaagctggggacagagatgggtcagacccaggtgttacccttgggaacttccagtctcaggggaggcagattcaggcaaagacaatctcaacccagaacaaggggtgctttagcggagtaacacggggcactgtgggtgataagtgaagacccctaaaccaagtctatgggagatccaggaagactttcctgaggaagggccttttggaaaagggttttgaaaggtgaataggagttcacccttaaagccacactccttccacagcatcaccacccagatctcctgaggagcataacatgaggccctcatattttaaggaaacatgaaaaggagaaacaaccagctcccccaaagcccctgccttcctctgctctgaaattcccatcctctctcctttcccccaataaaggtccaagagggaacaggaggtgacggagctgaagaagactctggaggaggagactcgcatccacgaggcggcagtgcaggagctgaggcagcgccacggccaggccctgggggagctggcggagcagctggagcaggcccggagggtgggttggggcagggggacagggcaggggggccacggggagggcagggcaggacgcggggttggaggaggtaccgctggctggttctaggctagctcatctccctgggcccctttcctcacgcattcatgtgcatctttcattcagcaagcattaatggggtgtggactatgttccaggagcattgctggggaaccagccatgaacccaacaaccagcactgccttcccttgtggagctttccttttagtgagagaggcagagggtaaacaatataaacactttcagtttatattggggtgataagtgctatggggccataatgaacaggaaaaagggatcagaattctaaggcgggtgagtttttaagtagagaggctgtggaggtattctgcgagaaggtgacatcagggtaaaaaactgagggagtggccgggcatggtggctcttgcctgtaactttgggaggctgaggcaggcagatcacttgaggccaggagttcgagaccagcctgggcaacatggtgaaaccccatctctactaaaaatacaaaaactagctgggcgtggtggcacacacgcctatagtcccagctacttgagaggctgaggcaggagaatcacttgaacccaagaagcagaggttgaagtgagtcaagattgtaccattccactccagcctgggtgacagagcaagactctgtctcaaaaaacaaacaaacaaacaaaaatgggccagacgtggtggctcatggctgtaatcccagcactgtgggaggctgaggtgggtggatcacctgaggtcaggagttcaagaccagcctggccaacatggcaaaatcccatctctactaaaaacacaaaaaattagccgggcgtggtggtgggcgcctgtaatcctagctacttgggaggctgagacaggagaatcacttgaacctgggaggcggaggttgcagtgagcagagatcgtgcctttgcactccagcttgggcaacaagactgaagcactgtctcaaaaaaaaaaaaaaaattgggagtgaggggtgagctatttgttcactgggagaagtgtgttccaggcagagggaacagccagtgcaaaggccctgagatgggagtgtgcctggcctggtccaggaaaggcctcatagatctttgctcatctccttcccacaccagggcaaaggtgcatgggagaagacccggctggccctggaggccgaggtgtccgagctgcgggcagaactgagcagcctgcagactgcacgtcaggagggtgagcagcggaggcgccgcctggagttacagctgcaggaggtgcagggccgggctggtgatggggagagggcacgagcggaggctgctgagaagctgcagcgagcccaggtaagtggggtgggcagggcagaggtttctgctgtgtgaccttggtgacatgcctgccctctctgggcttctatttggtccatatcaaaccaattgtctcgtttggctcttccaacataatcatgtacaagtctgggcacagtggctcatgtctgtaattctagcacttgggaggccaaggcaggaggattgcttgagcccaggagttcgagaccagcctgggcaacatagtgagaccccatcttcagaaaaaaaaaaattttaattagccaggtatgctggcatgtgcctgtagtcccagctactcaggggactgaggaaggaggatcccttgagcctgggaggtcgaggctgcaatgagctgtgattgtgccactgcactctagcctgggcaacaaagtgagatcctgtctcaaaataataataataatacccagtactttgggaggccgaggcgggcagatcacctgaagtcagaagttcgagaccggcctcaccaacatggagaaaccctgtctctactaaaaaaaaaaaaaaaaaaacacaaaattagccgggcgtgatggcgcatgcctgtaatcccagctactcgagaggctgaggcaggagaatcacttgaacccgggaggcagaggttgtgatgagctgagaccgcgccattgcgttccagcctgggcagcgagagtgaaactccatctccaataataataataataattcactcatttaagatgtgcaattcaatggattttggtatattcacagagtggtatggccatcaccataatctaattttggaccattttcattatcccaaaaagaaaatcctataccctttagctatcatcccccacttctcccccaccccacccagggaaccactaatctcctttctgtctttactgatctcccattctggagatcttatataaatggaatcctactatatatgggtggcctttgtggctgccttcttttacttaacataacggtttcaagattcatctgtgttgcagctcgtagcataattccttttttattttttaatttttaaaacaccagctgggtgcagtggctcatgcctgtaatcccagcactttggcagcggaggcgggtgggtcacctgaggtcaggagttcaagaccagctgcctgaccaacatggtgaaacttcgtctctactaaaaatacaaaattagccgggtgtggtggcgcatgcctgtaatcctagctacttgggaggctaaggcaggagaatcacttgcacctgggaggcggaggttgcagtgagccgagattgcaccattgcgctctagcctgggcaacaagagtgaaactctgtctcaaaaaaaccccaaaaaacaacagcacgcaatagatccatatacctttctattgccgaataatgcccgttgtatggatattccacatttgtttatccattcgtttattgatggacattggggctgttcccgcctcttggcgatggtgagtaatgccactgagaacattccggtacgagtttctgcatagacctatgcgttcatttcttttgggtatgcacctaggagcgggattgttgggtcatgtgggaaccctatgtttaagcatctgtggatctgccagactgttttccacggcagctgtaacatttcacattcctgccagtgtggtagagagttgaggcagatggggtcactgggtggaagccacgattggagggcttcattcccgtcccttccctgcaggctgaactggagaatgtgtctggggcgctgaacgaggctgagtccaaaaccatccgtcttagcaaggagctgagcagcacagaagcccagctgcacgatgcccaggtgaccctgcctgcccttcggctccaccgtcaccctcccctccttgtcctcccagccacacctgacattgccgtctcctccatctacaggagctgctgcaggaggagaccagggcgaaattggccttggggtcccgggtgcgagccatggaggctgaggcagccgggctgcgtgagcagctggaggaggaggcagctgccagggaacgggcgggccgtgaactgcagactgcccaggcccaggtgagcagccctacgtaagaccttcagggaggcacagcccccctcactgctcctcctgggttccccagctcagggatggccatgctgcccaccttctcataggccagacccatgggtgcctttctcatctctgactcccccttaccccccacagcccatgcccagccctggctgtcctgacccctgactctcagcctcatcccttgtcccagctccagctcagccccagctccagtgccgtcctctcccatctagatcctcctcttggcctctgggcctccagcctctcccctaacagctcatcccctgcacagccccagaagcttctttctttacctggagctgaccctgtccctcctctgctcacagctctcccacgcctccccagtactcctagacaaagtccatgcctctcagtcaggcattgaggccctgcaatctctggtccttcctctgcctttagctgtattcatctctatctctactttcctattttatttgaaaaaaaccttttatttttccagacttagcattaggctcccctgtgggaagtttcctgacccgtcttctctttctcctctgtcccaactccagtcaccttgggctgggactgtctctgcccatgagtctccccaccagactgagagccccttcaaactagaatcccatcagagttagatccaggtctgtagcacagcctgatatagggcctgatgtatggtaggcgttgagaaatgcctattgaatgaatgagtgatggtacgtgcctgcagatatccttcaactggcagacttctatgcatacttcaagacccatctcaaatgctcctccttcaggaagtttctcctgaatgttctaaacagattctgggcacttcctgtggacctccatagctcccatactgctaccttaacccctatcaccctggctgtgactctgtgtctcccccagcagccgaggggctccccaggaaagactccaggtctgattcacctctgcatcttggagggagtaattttaattccctggaagaactagggctcatagtattcacaacttcacaccactcagaggcagaagagcccagcagaatgacccctttccctcttcaggcctcagtctcttcatcctggaaatggagcaccaccagcttacaccttggtcactcatggccgtgaccaccaaccaccctctctctcctcccctcagctttccgagtggcggcggcgccaggaggaggaggcaggggcactggaggcaggggaggaggcacggcgccgggcagcccgggaggccgaggccctgacccagcgcctggcagaaaagacagagaccgtggatcggctggagcggggccgccgccggctgcagcaggagctggacgacgccaccatggacctggagcagcagcggcagcttgtgagcaccctggagaagaagcagcgcaagtttgaccaggtggggcacctcagttcacccagccggggaatcagcaagtccatctacgcttcccatggtcgttgtgaggaaccagtaatccgtgctgtcacggctcaactaggcagttgtagtggaccaggaagcaagacccttctttgctctgggcctctgtaaaataggacatccctctgtcctgattcatgcctcttgccacagcataattcctcgtagcacccacttttactttcagagctgccctggtttttggatgacaaaatatacgaataccttcagtaccccagagattgcttatgagaattaaatcaaataactcatctcacttctgctgattcacggggtacctcaggcaagttgctttttccatctcagcttcagttcgcccatctggaaaatggcaataataccaagcatctggcagcctgaggatgaaataaaaatcacagaaccttagagagttcagatcaggcaatcctgaggttcagatcccaattcggcctcttgatggctgtgtggcttgggcaaattgctcaacctctctgtgctttattttattcatttagaaaatgcagtgtgaagctgggcactgtggctcatgcctgtaatcccagcactttgggaggccaaggcgggcggattgcctgagctcaggagttcacaaccagcatgggcaacacggtgaaaccccgtctctactaaaatacaaaaaaattagctgggcatggcggtgtgcgcctgtaatcctagctactcgggaggctgaggcaggagaatcacttgaactggaaaggcggaggttgcagtgagccaagatcgtgccactgcactccggcctgggtgatagagcaagactccatctcaaaaaaaaaataaaaaattaaaaaaaatttttttaaattgtcatttccctgtaggtggtgcagtatgtttttctagctgacttacgatttctctctttatgtttggttcttagtggtttgactgtgatatgcccagctgtgggttttttgtatttatcctgctttagattcactgtgcttcctgtagctgtgggttgatgtttttgatcaaatgtggaacatttcagccattatttcttcaaatatttttatctcccactctctctccttccccttcttcttggactccaaatacatatgatttgattgtaatactcttccacaggtcattgaagctttattatttttggcatcttctggaattttatataaattattttcacataaatctcttttgggatgggcttattttactcaaaataattttttttttttgagacagagtctcgctgtgtcaccaaggctagagtgcagtggcacgatctcagctcactgcaacctccacctctcaggttcaagcgattctcgtgcctcagcctcccaagtagctgggattacaggtgtgcaccaccatgcctggctaatttttgtgtttttaatagagacgaggtttcaccattttggcaaggctggtctcgaactcctggcttcaagtgatccacccacctcggcctcccgaagtgctgggattataggagtaagctaccgcacccagcctcaaaataattagtctgagatccatccatatttttgcatatcaataatgtattccatgtatcaataatgtatttttgctgctgaatattattcctgtggtatagatcagccacattttgatattcattaaccttttgatgaacatttgggtttttttccagtttttttctagttatggataaaaccttagtctttctcaaaggtggttttaattaacatttccctaatgaccagtgacgttgagcatcttttcatatgcttatttgccatccatatatcttatttgctgaagcttctgttcagatcttttgcctatttgttaattaatgttgtttgttttactattattgaattttgaaaattctttatgggccgggcacggtggctcatgcctggtaatcccagcactttgggaggccaaggcaggcagatcacctgaggttgggagtttgagaccagcctgaccaacatggagaaaccccgtctctactaaaaatacaaaattaggtaggcatggtggtgcatgcctgtaatcccagctacttgggaggctgaggcaggagaatcgcttgaatctgggaggcggaggttgtggtgagccgagatcatgccattgcactccagcctgggcaacaagagtgaaactctgtctcaaaaaaacaaaacaaaaaacaaaaaaaaaacaaaaaaaaagaaagaagttatttatgtattctaaatgcaagttctttatcagatatatgctttgcaaatatttttgtccagtctgtggcttttctttccattctgttagagtctttcaaagaacagaagtttttaattttgtccaatttatcaatttgttgttttatagattgtgcttttagtattgtatataagaaatttttgcctaactcaaggtcacaaaggttttatcctggtttttttcttgttttctttttgtttgtttgtttgttttgttttttgagacggagtcttgcactgttgcccgggctggagtgcagtggcatgatcttggcttactgcaacctctgcctcctggggtcaagcgattcctcctgtctcagcctaccaagtagctgggattacaggcacatgccgccacacccggctaatttttttatttttattttttttttattttttatttttagtaaagacagggtttcactatgttggccaggctagtctcaaactcctgaccttgtgatccacctgcctcggcctcccaaagcactgggattacaggcatgagccactgcacccggcctatcctgttttttttttctggaagtcttccagtttcaagtttacatttaggtctgtgatttattctgagttaatttttacatatgatgctatcatggctccatgttaatttttgtgaatataaatatccaagtattccaacactgctctccactgacttgtttttgcatatctattgaaagtcatttttcttcttcttcttctcctccttctttttcttcttcttcttctttttttttttttttttgcccaggctggagtgcagtggcgtgatcttggcttgctgcaacttctgcttcccgggttcaagcaattctcccacctcagcctcccgagtggcttggattacaggtgtgcgccaccacacctggctaatttttgtatttttagtagagatggggtttcaccatgttggccaggtggtcttgaactcctgacttcaggcgatctgcctgcctcagcctcccaatatgctggaattacaagcataagccactgcaccagccttttcttcttatttgaagttattttgcctcttctagttcctttgcatttccgtatgtattttagaatcagtttgtcaatttctaccccaaaacaaaaagccttccaatttggaactgtgttgaatctatacaacggttttggaagaactgacatcataacaatattgagttttctcaccgaggaagagggtatatacgtccattgaaataccttagaaatgttttttagttttcaatgtacatctttcacatctgctgccagatgtatttctaagtatttcatggttttatggctattttaagtgatgttgctttcatttccatttttgattgctagtatatagaaacaatagatttttgtatattgatcttgtatcctacaatcttggctaaactcacttactagtgctaatatagtttttatatatttcattggattttctacatagatgatcatgttttctgtgaacaaaggcagttttacttctttctttaccttttctttacccttctaggactccaaatgcttgtatgtatgactgcttggtacttttttcaggttgttaaagttccattaatttctgttacaatcttctttctttttctttctttgctctgtttggataatttatattgacctgctttcaagtttactgattctcctgatgtgtccagtctgctactaatttcatccagtgacttttttatttcagatatttcatttttcagttctggcatttctatgtggttctattttacagtttcaaatccctcctcaaataactgcctcttcacccattgtatctgtctcgttctgaaacttatcatgaagtccttgtgtgcacgttctaatatgtaggtcatctgtgggtctatttgtatggactgatttttctcttaactatgagttctgttctcttttcttttttgcatgttttataagtttatttgccaattactgtgtcttaaaaaaaaacagtaaaggttgaagtacatttaaaaatatatatatgtgtattttttctactgccactcttaagaggaaggaatgccctttcttctgttgaacatatagagttagggactgatcagtttgatccattcaagagttaagctggtttgggacacggttgcaactttaatccctctacctccctcttgtgtctctgcctttgtctgtctctttctctctctttctctgttcctggctgctccctcttcccgttcccttgtacactcctttcagctaatctatttccccctaccccatctccctcaaactggaagcttctggcagaggagaaggcagctgtacttcgggcagtggaggaacgtgagcgggccgaggcagagggccgggagcgtgaggctcgggccctgtcactgacacgggcactggaggaggagcaggaggcacgtgaggagctggagcggcagaaccgggccctgcgggctgagctggaggcactgctgagcagcaaggatgacgtcggcaagagcgtgagcagggcccccgctccccgggacacactgggtgaggggagacacgtacatgcatgtatgctttcacacatagaacatgaaaaacaaccagccatcaaagtcatatgttcatgcacaaagagaacaagagggctgggcatggtggctcactcctataatcccagcactccagcactttgggaggccaaggtgggcggatcacctgaggtcaggagctcaagaccagcctggccaatgtggtgaaaccctgtctctactaaaaatacaaaaattagccaggcatggtggcacatgcctgtaaccccagctacttgggaggctgaagcaggagaatcgcttgaattcaggagggagaggtttcagtgagccgagatcattccactgcactccagcctgggtgacagagcgagactgtctcaaaaaaaaaagagaacaagagggggactgttcagcaaacatttgcatccatatagacacacacagcgtgaagagaatctccaccaaacactgtgctaatgcacacgcatagaaagtaaggagagccattcaccagaggcaggtcttcatgtagacattcacagaacgtgaggagaatcttccatccagcacatgtgttcacacacagaatacaagagctgctcacaaagcacacatgctcacatttgtgtacacgggatgtaaggagaatcttctattacttgtttttgtttgttttttgttttgttttatttttgagatagggtcttgctctgttgcccaggctggagggcagtggtgcaatcatggcacattgcaacctcagtctcctaggctcaagcagtcctcctgcctcagtctcccgagtagcagagactacaggtgcattccaccatacctggctgttttttaaattttttgtggagatggggtcttgctgtgttgcccaggctggtcctgaactcctaggctcaaacaatcctcccacttcagcctccctaagcattgggattacaggcatgagccactgcaccttgctgagaattttccattaaatacacatattcatgtgcatatgtacacatacagcatgagaaaactactcaccacacatatgtatggatgctcagagagagaacacgaagagaatttactacaacacacagcctgagaaccactcccccgacatgactaggtgcatgcatacatacataacacacatacacacacacacacacacagtgtgaggactcccactttgcctgccaccaattccactgagcacacacagactctcccaccaagcctctgtcttcccttaactcgtgtatccctccagggcctgtagggtggtgccccaaggcttctcgcaggctcccctcacccagccagtgtcccagccttccgaatggtcaaaatgacccgccacatcctccactccatccttccttcattcatcctctgaatacatttatggatcacacccagggacacaggccaccctcactaatgatgggaggcactggcagaatttgttgagctcctgaatagatgctgtcttgacatccttatttctttattttcccaacaacgtgcttctaggagtccaatgggtgagggctttatcttctccacgcacttagacgttgatccgattttgcttttagccaggcctggagagaacccctctctccctgacacagacctggcctgcagccctagggataattgagctaaaacccagctcatacttgagccgttaaggtccgtcccttgggaaaaatgtcaggttatttgtagtgactccaaaggcccttgtgggaaacaggatgttgatgggagaaagtttgatcccttcaagtaaacaaaataaattggcaagtaccaaataggaagggaggctagagggcccattccacggaccgaaagtagatactgtcagtgaccagaattgtaatgaacatcatgtgggcagtggcgatccacagacataggccttgctctgtggaactcacagttcagtgcgggaggcgggtgttgcacaaaaagccacctaagcaaatgtcaaatgaccactgtgactagggctaggtaggagaggggccccagtgccaggagcatgggtagcagagaggccctgatgggttaagagaggcttccttgaggaggtgacagttaagtaaggagaggggtgaagggggagtctctgaaaattcataagcccagctctattttcacagcatttgggggtttaattcatacctccctgaaagatcagggaccctcccaaacagaaaacccaatagaagtagatagtgggtcggtgacaccctggggagtctggcaaacaccagcactgatgaccctggagctacgtgccttcaacccattcgcacagaattcccaaagatgaattcccagtgagtgagctcacagtgcaaaattacaaaactcagagggaataatccaccatgagtgagagtcagctgacctaacagacgcttgtattggactctgaagggcttcagataatagaattatgaagcatcagttattcatgaaatacattttggggtgatgctgaatgagacacctaggaaggagccgttcagcagattttgaatggatgaatgaacaaactaggatgggcacactgacttgccatctccccatcctccatcaaatcttcccctactctagctaggctcctaacctcctctgcctcagtgacccaggtacccagcagctactctccccaccaggtgcatgagctggaacgagcctgccgggtagcagaacaggcagccaatgatctgcgagcacaggtgacagaactggaggatgagctgacagcggccgaggatgccaagctgcgtctggaggtgactgtgcaggctctcaagactcagcatgagcgtgacctgcagggccgtgatgaggctggtgaagagaggcggaggcagctggccaagcaggtattgtcacacagaaggccacagggtgccagtccagctggggtatgccatggtgtgtacaggcagcaagaagggcagcaaggggtctccccgacccacccaccactctgtctcctccacccgccgaccactcagtatctccccaacccttccactgctcagtgtctccccacccacctgccactcggtgtctccccacctgcctgccactcagtatttctgccagtctctcgtgccagccaaaccatcttcctcccacaaaaccatcttcctattccccaacccattaacctgccatgacccattaacccacacacatatcctgttgacctgttgctgtacccaatcatacatcctccatccaccacacaaaccattcacccatccatctgccaccccatctattcaactaccctaaccacccacatacagcctctcccccaaccagcgttgtgtccaactactgctccatccacccagtgactcccttccaacccatctcctctccccaacccaacccctcccctatttacccaaccccagcccctcagcaccccctgctgactccacttagtcactgactcactgacctgctcatccgccctcccctccatccacatccttccccaatccagtcagtcatcgctccctcgcttccttgtttgttccattgctctctccctccctgcatcgttcattcattactcgttcagtccaggaacttcccatgtctcccctctactaggtggtgaggggcaggggcagctctgggtgtcagaaagaccccgctggagccatgtaggcaacagacttggggtggagggtgctagaagctggggaggcagggaagagaggtgaacaggtgacctaaggccaggggtctctgcagggttttgtctctgctagcccctttgacttagacatggctgagtgtccaagacttggccctgggggcactggggaaccatgggagggctatgagcaggatcagctctggagacgtgttggaatgggctggaggggagagatgagaggctagaaaggaggcttaggtgagatgggggactgagctggggcagtagggatagagaggagaccaagtaaagagagtcagggagtgagaggagcggggcttgcagcctgggcaggagctccagggcagacatccatgtccctagcacacagagggaggctgggcttcctgtgtctgacccggtccctcctgacctcctctccagctgagagatgcagaggtggagcgggatgaggagcggaagcagcgcactctggccgtggctgcccgcaagaagctggagggagagctggaggagctgaaggctcagatggcctctgccggccagggcaaggaggaggcggtgaagcagcttcgcaagatgcaggtaagagccggcgtgagctgcagggaggggaggctttggtgtcttcaagccccaaccatcactccagggtctaaggctagctcggacccctcgctctcaacccacaggcagcatccgcatgggtcagcacctttataaacatccatgccccagaggctggcttccttcttcttctattttacatttctttcatttaaaatgctgcacttttaagtcaaatttcctcatttttttgtttgtttctttgtttgttcagttggtttttttttttttgagacagtctcattctgtcacccaggctggagtgcagcgacgtgatctcagctcacagcaactctgcctcccaggttcaagcagttctcctgcctcagcctcctgagtagctgggattacaggcgtgcgccataatttttgtatttttagtagagacaaggttttgccatgttggccaggctggtctcgatctcttggcctcaagtgatccacccgcccccatggttttgtttttgaagtgaaaataccatatggttttttggccagacacagtggctcacacctgtaatcccaccactttgggaggccaagatgggcagatcacctgaggtcaggagttcaataccagcctggccaatatggtgaaaccctgtttctactaaaaatacaagaattagccaggcatggtggcacgcacctgtggtctcagctactcaggaggctgaggcaggagaattgcttgaatccgggaggcagtggttgcagtgagttgagatcccaccagtgcactccagcctgggtgacagagcgagactgtctcaaaaaagtaaagatagaaataaaataaataaatcaacagtaggcaaactgaggctcagagaggggcagtggctggctcacagtcacccagcaaggatatggccaagttgtaattcaaacccatgtctatctaacttgaagccaggctccatcaggcttccagctgccttctagttctcagccaggtcaacctcctcccttgaggaccagagtgggagaggctggctcagggtcacacagcaagtggctttatacacaggagcccaggtctgcagggttcggagagttccctgcttgttcacgggagctgaggagccccgtcggtctggcaagggggtggaggagttccctgtgctgtgtggccaggctgagcccatctacctattccgttccacccaggcccagatgaaggagctatggcgggaggtggaggagacacgcacctcccgggaggagatcttctcccagaatcgggaaagtgaaaagcgcctcaagggcctggaggctgaggtgctgcggctgcaggaggtgaggctggggtaggctgggccctgggacaggaagctgggaggtgggcaaggctaaccttgaggtccctggatgtgaagctggggaggtgggcggggctaaccacagggtccctggatgtgaagctggggaggtgggcggggctaaccacagggtccctggatgtgaagctggggaggtgggcggggctaaccacagggtcccagggtgtaaggctcgggaggtgggtgtgtcttaccatgtggcctgcaatgccagcctaagagcagggattttgtcttagggcactagggagccatggaaagatccagaacagaggatgggcagggtcagctctgtagcagttgaactggagtggggagattggagtcacaaaggctgtgggagtgggagtgggagaggggagagagagagagattgagaaagagagagagaaccctgagccagggccaaggggatgcagaggacggagaaggcagtcagaaggcaggagggagaaggctatggtgaggggggccggaggaggggaggagagcactgggggtctggcccggtgattgggggaccctggaggagaggcaggtttgagaggaggacctgtgtgcagtaaaaggtggagagggtgaggggcctgggggttgggctgcaagaggtgagcacaggtcaggggctcaggagacagatttaggagacatctgtaggttgcagctcattccagggttacccagggacagcatgagaaaaaagccaagagccttgaggtgtgagggacagagaaaggggtgagacccgtgcccagattgcttctcctcacacccaccggccacccctccatcatcacaggaactggccgcctcggaccgtgctcggcggcaggcccagcaggaccgggatgagatggcagatgaggtggccaatggtaaccttagcaagtaagtgccccaagggtctgaaggctgaggtactgcgtctgcaggaggtgaagctggggtaggctggaggtggctgggctctgggacaggaaactgggaggtgggcggggttaacctcggggcccctggggtgtgaggctggggagatgcgtggggctaaccacagggtcctgtagtgtgaggcaaggcaccctcctctgaccatcctgtcctttcatccccacgccttcctgtctccctagggcagccattctggaggagaagcgtcagctggaggggcgcctggggcagttggaggaagagctggaggaggagcagagcaactcggagctgctcaatgaccgctaccgcaagctgctcctgcaggtgagcgtgattgaccgcccccaccagcctcagtccccattgacctgggaccgtaaccttcagtcctcttattcaacaaatatagaaaggggatatttgagttgggttttgaaggttgaataggagttcttaaaagggttgaaaggcatgattcacttgtatttctgaggggtttcttcagggctaaatccaaagatgaattatgtggggaaacagacatgggccagcaagtgtgatcatggaagtctcctgggcccagtagagagagagaaaagactttctgcaggagtcataagaaaacatttggaaaaagagacatttggctgggggttttaaagcataagttggagttcagcagagggagaaaagcatgttttcctttgcatatttatttataaatattttctgaggattccggtggcccagatcctattccgggttatgctggggacctggagatggttaatactaagcctctgccctcaaacacgtcttagtctaaaggaggaaatagaccatcccaatacagagatacaagtgaaaatggaggaaacacgggcactgtgggaacctagaagggactaccaacctagcctggaggatagaggccatcagagaaggcttcctggtggaggtgatgccttgagagatcttaaaggaagtgtaagagtttgccaagaagacaacagagtgatgggatttccaaggacaaaccaatgtctgcattcttcattagtttttttctaattttttttttttttttttgaggtggagtctccctctgttgcccaagctggagtgcagtggtgctatctcggctcactgcaacctctgcctcccaggttcaagcgattctcctgattctccaattttctctacaaaatatttaaaaattagccaggtgcagtggtgcatgcctgtagtccaactacctgggaggctgaggagggaggatcgcttcagcctgggagattgaggctgcagtgagctatgattgtgtcactgcactccagcctgggtgactggatgacagagtgagaccctgtctcaaaaaaaaaaggtaataattatatgctcaacagttatgtgtagtaagactactttttaaatggagagaatggggaaaatatgcaaaatgttttaacctactttaattgatggtgatagtattagcactgtttttctgagacattgagtttataatgtgggataaagtaaatgatcaaagatgggatactatgtcatctactacgtccttgacatcagggtactcagcaccaaagaaccttgatatagttgtcctagagaagagattaagtttttttttttttttttttttaaaaacaggccaggtgtggccgggcgcggtggctcacgcctgtaatcccagaactttgggaggccgaggcgggcagatcacgaggtcaggagatcaagaccatcctggctaacacagtgaaaccccgtctctactaaaaatacaaaaaattagccgggcatggtggcatgtacctgtagtcccagctactcgggaggctgaggcaggagaatggcatgaacccgggaggcagagcttgcagtaagccgagatcgcaccactgcactccagcctgggcgacagagcaagactccatctcaaaacaaaaaacaaaaaaacaaaacaaaaaaaacaggccaggtatggtggctcatgcctgtaatctcagcactttgggaggccaaggtggaaggatcgcttgagcccaggtgtttgagaccagcctgggcaacacagtgagaccccatctctacaaaaaatatatgtgaaataaaaagagaaaagaaattacgtttagtggggcgcagtgggtcacgcctggaatcccagcacttttggtggattgcttttagcgtaggagctccagaccagcttggatgacatggcaaaactccatccctacacaaaattgaaaaattagctgggtgtggtggtgcacacctatagtcccagctacccaggaggctgagttgggaggatcacctgagcccagggaggtcgaagctgcagtgagccatgattgcaccactgcactccagcctgggcaacatagtgagaccctgtctcaaaaagaaaagtgataaattatgtttaaaaaatagtttaagccaggcgcagtggctcatgcctataatcctagcactttgggaggctgaggcgggtagatcatgaggtcaggagttcaagaccagcctggccaacatggtgaaaccccgtctctactaaaaatacaaaaactagccaggcgtgatggcgggcacctgtagtccagctactcgggaggctggggcagagaattgcttgaacccaggaggcggaggttgcagtgatctgagatcgtgccactacactccagcctgggtgacagagcgagactttgtctcaaaaaaaaaaaaaaagtttaaaaacaaaactaagcaaacccctgtagttctcaatttgacttcatcatattcacgtgaactggtgatgtattttatacagatccagtctctctgaccacccaaaaggcctagaaacagggaacccagtagcaatgagtatccctatatccacgttgtgatctggaaatgctgtttccctctaaaagaaactggggctggctgggcgcagtggctcacacctgtaatcctagctccttggaaggctaaggcaggaggattgcttgagcccaggagtttgagaccagcctgagcaacccagtaagaccccgtctctacaaaaaaaaaaattagccaggtgcgatggcgggcacgcctgcggccccagctactctgagggctgaggtaggaggattgcctggatccgggaagcagaggttgtagtgagccagaattgtgccactccactccagcctgggcaacagagtgagaccctgtctcaaaaaaaagaaaaagaaaagaagagaaatgaaactggagcttcttccgaagtggctgattccagatctggagcaggcaatgaacaagagtaacccagaacattttgcgatacccattagcaggaaagatagtatagttatgtcaagagcacgtagaagtcaacgtgaagagcctcgcgctggcccaaagtggggcaagttgagcttcaatgaggaaaataattgcaactgatttaatcccttgaaatctgtttaaattcaacagcaacgttttaaaaaaatattaattagttgctgtgttagttccctagggccaccataatgaattaccacaaacacagtagcttaaagcaacaggaatgtattctctctgtttttttttgtttgtttgtttgtttgagatggagtctcgctctgtcacccagactggagtgccgtggtgtgatcttggctcactgcaacctctgcctcccggattcaagtgattctcctgcctcagcctcccaagtagctgggactacaagcatgcaccaccatgcctggctaatatttgtatttttaatagggagggggtttcaccatgttggccaggctgctctcaaactcctgacctcgtgatccgcccgcctcggcctcccaaagtgctgggattacagacgtgagccaccgcgcccggccaggaatgtattctctcgtggtcctggaggccagaggtctgaaatcaaggtgtgggcagggttggttcctcttgttcatgcctctcccctggcttcccgtgggtgctggcagtccctgctgtttcttcatctgtagatgtgtcattgcaatctctgcctttaactttacaaggcattttcccatctttgtggctctgtctcatctcctctttttttttttttttttttttttgagacagagtctcgctcttgtcgcctaggctggagtgcaatgggctgatcttagctcactgcaaccttcacctcccgggttcaagcgattctcctgcctcaacctcccgagtagctggattacaggcgcccaccaccacatctggctaattttttttgtatttttagtagtgatggcatttcaccatgttggccaggctggtctcgaactcctgatgtcaggtgatccgctgcctcagcctcccaaattgctgggattacaggtgtgagccaccattgcctggccctcatctcctcttaaaaggacaccagccgtatcagatttgaggcccaccctaatccagtgtgacctcgcgttaatcaattacaactgcaaagatcctatttccaactaaggtcacattccgaggttctgagtggacatgaattttgcgtgggagtctattcaccccatgggtgcatggggagggcatgggggaggggcatggagcttccgtgccctcctgggagcgccaccctccaggtactgcacatgttcagcttccagaagctgcccaaaccctgtcctcttgggccttttatggagacgtcactggataggtgtgattaacaaccacgtagaaatgtgattggacaaaaagggtccgatctaaacccagcgaggcctgtctgttcagattcttcctggcttctctatgcagcattccttccccctctgaaatgagggtcctgtgatccacagtcaggttagagtttctgccttgtgcaggtgaaagagggggcaggaggaggttagagagagaggttctgtttactctaaaagggctatgcaaattatgatcaaggaaccatggacaaaacccaacacacacacaaacacacacacatacacacacacacacatgcacacatgaagtatatacgcaaagcaatatcacaggtacaaattcccttgaaaattcacaaataaggccaagcgcggtggctcacacctgtaatcccagcactctgggaggccgaggctggcaggagttcaagatcagcctgaccaatatggtgaacccctgtctctactaaaaatacaaaaattagccaggcgtggtggcgggtgcctgtagtcccagctactcagcagggtgaggcagaagaatagcttgaacccaggaggcagaggttacagtgagccgagatcgagccactgcactccagcctaggcaacagagcgagactccatctaaaaaaaaaaaaaagaaaagaaaaaagaaaattcacaaataagacagaaagatcgggtgcagtggctcatgcctgtaatcccagcactttgggaagctgaagcaggtagattgcttgagaccaagagttcaagaccagccaggacaacaaagtgagaccctgtccctaccaaaaacaacaacaacaacaaaactatcagggcatgatggtgtgcacctgtagttccagctagtcaggaggctgaggccggagaatcgcttgagcccaggagtttgatgctgcagtgagctatgattgtgccactgcactccagtttggacaagagtgagaccctgtctccagaaaacaaaaaacaaaaaagaaagaaagaaagaaagaataaagtccctggacacagctgccaatttccaggaaacacagaggagagacaaataaatgctgaattagaccgtaagtgtgtgatcagaaaaatccagacagagaggaactctacaaggctaacaacctacattcttcaacagataaattgtaagaaataggctgggggcagtggctcacatctgtgattccagcactttgggaggccgaggcgggcagatcacctgaggtcaggagtttgagaccagcctgcccaacatggagaaatcccatctctacaaaaaaatacaaaaatgagccggacgtggtggtgtgtgcctgtagtcccacatacttgggaggctgaggccggagaatcacttgatcctgggaggcagaggttgcagtgagctgagattgcaccactgcactccagccttggtgacagagcaagactccatctcaaaaaaaaaaaaaaaaaaaaaaaaattttaaaggaataaaagggatggaggagggaactgcaggttaaaagagacttaaaagacatatatctggccgggcgtgatggctcacgcctataatcctagcagtttgggagaccgaggtgggtggatcacttgaggtcaggagtttgagaccagcctggccaacatggtaaaaccccatctctactaaaaatacaaaaattagccaggtgtggtggtgcgtgcctgtaatcccagctactcaggaggctgaggcaagaaaatcgcttgaccccgggaggcagagattgcagtgagccgagatcgtgccactacactccagcctgggtgacagagtgagactgtgtctcaaaacaaacaaaaacaaacaaacaacaacaacaacaaacccacatacatctacttttttaaatgggtaggattcaactataggatctagggatgcatctgtgtgtaataaaactaaagacatacaaggaaatgaggacctgagaagtcaggataacatgatattttggggagaaggaagaggttttcattaggagtagtgcatgaaagggcttctggaagggcaaagttctctttcttgaccaaggtgctactgacagtgatgtctgccttttgttaactcatgatgcctgtgcgggatgacacccacacacatccatgttcagagacaggaagcagcagggtcatggggctgaaacggttctcatctccagctgctggaataatcaggaacactcccataatgttcttggttgagaattactgtgctaataaaactagcagaatatttattactgattttttttatttgattaatgtttggctctctgtatcaccattttatttcacaataaaaagtttgaggccgggcgtggtggctcacacctgtaatcccagcactttgggaggctgaggtgggtggatcacttgaggtcaggagttcgagaccagcctgaccaacatggagaaaccccatctctacaaaaaatacaaaaattagccagttgtggtggcaggcacctgtaattccagctactcaagaggctgaggcaggagaatcgcttgaacctgggaggcagaggttgcagtgagctgagatcgtgccactgcactccagcctgggcgacagagcaagacatggtttctaaataaataataaaataaaataaaattagcaggggtgatggtgtacgcctgtgatctcatctactcaggaggctgaagtgggaggatcacttaagcttgggagtttgaggctgcagtgagctgggatttcaccagctgggcaacggctgtgctccagcctgggcaacagaacaaaactgtctcaaaaaaagttttttaagttaaaaaaaaaaaaccccacaaaggagaatatgctaattacccagtcattgtgtccctgcgagggtaaaataaagtatgaatcagactgggtctgactcacttccatgtacccagcagaaggcctcgctcagagtacgagctgaataaataaacgggaactattattaggggtgtgtttacacattttccacgtagcagctactgtttattgaggccgtgtttctcaaaatgctcctgcatataacacctgagatgcccgttataagtgcagattcccagactccactttggtattgctgagtcagaatctctgaagggtgagacccagatgtctgcatttttttcccaagctcccccagatgatcctggtgcaaacaaaagtgtgataacccttagaatggactcattcacagtcagaagtagaatttatgacatttaaacaagtttgtgatggtctcgtggacttattaaagtaagcagaaaactatccaaaatgttaagacccagggctggcagtgctgtgggtgacaagtcaataaactattaataaaaatacaagctaacatctgttgagtatttagtatgtttcaggctctgtgctatgcgtgtgacaatcatcagtgcacttaattctcagaggtgcctggatttacctaccaccttccctctgagactccaccatgacatccttccttcccctcctgctacaggtagagtcactgaccacagagctgtcagctgagcgcagtttctcagccaaggcagagagcgggcggcagcagctggaacggcagatccaggagctacggggacgcctgggtgaggaggatgctggggcccgtgcccgccacaagatgaccattgctgcccttgagtctaagttggcccaggctgaggagcagctagagcaagagaccaggtaggtgagagcggaggccacaggagaaaggtgacctccacattctggttggtgagaggaaggaggctgtgttacaaacacgtggtttagaaacatccaaaagacatcatcatagtaatgactgctggcctggcatggtggctcacgcctgtaatcccagcactttgggaggcagaagcgggaggatcccttgaggccaggagttttcagaccagtctgggcaacatagcaagacctcatctctaaaaaaaaaaaaaaaaaaaaaaaagccaggtgtgttagcgtgtgcctgtagtcccagctgctcaagagcctgagataagaagatagcttaagcccaggagtttgaggctgcagtgagctgtgatcacaacactgcactccagcctgagtaacagtggaagaccttgtctctaaaaaaaaaaaaaacagccaggcacagtggctcacacctgtaatcccagcactttgggaggccaaggcgggcagatcatttgaaggcaggagtttgagaccagcctagccaacatggtgaaaccccatctctaccaaaaaacaccaaaattagctgggtgtggtggctcatgcctgtagtcccagttactggggaggctgaggcaggagtattgcttgaactcaggagatagaggttgcagtgagccgagattgcgccactgccctccagcctgggtgacagagccagactccatttaaaaaaaaaaaagaaagaaaaaaagaaaagaaaaagatgccaggcacggtggctcacgcctgtaatcccagcactttgggaggctgaggcgggcagatcacctgaggtcgggagttcgagaccagcctgaccaacatggagaaactgcgtctctactaaaaatacaaaaaattagccgggcgtggtggcacgtgcctgtaatcccagctactcgggaggctgaggcaggagaatcgcttgaacccaggaggcggaggttgtggtgagccaagatcacgccattgcactccagcttagcaacaagagtgaaactccgcctcaaaaagaaaaaaaaagaaaaagaaaaagaaaaaacaaacaaagtgtgtaaatatatgtaaatatttaaatgattgctgattttctgtatcatttaggatgctttgggctgcaagtaactgcagtctcactacgagtattatttacgtaataacgtgccagttagttatagctgaattacaaactactctgaaacttagtggcttaaaacaacaaccatttattattgcttatgagtctttggctagtaagttctgctcatttgggcttggtgggcttcactcatcatccgctcagttgagggtcagctagatggatttgctaatcttggctgggctttcattttttttttcttttttcttttcaagaacagcatgagtggtattggctgggcttgcataactcttaaggctttgcctaggacaactaagctaacttgtctctgctctatgtggcctctcatcctccaggaggctagcccaggattgttcatatgacagagtcaaggttctaagagcaagggaaagtgctaaagactccttgaggcctgcacttggaactggtactgtgtcacttctgccatatcctattaaccaaagcaagtcactcagcccgctcagattcaaaggaatggggaaatagatatgactgtttgataggagcaactgcaaagtcatattgccaagggtatggatacagaaaggggtgagaactgggaccatctgttgtatcagtctagcacaaagaggaatgtctttttttcaagtgataagaagtctagagctaggcagccaaaagatggtagggctctggatcaacatctgtgttgttttttagtcttttcctcatggtcataaaatggctgcaattgcaccaagaaccatacccacagacatccatgttcagagacaggaagcagcagtagtatggggctgaaagagtttccatctccagttgctggaatgaccaagaatgcccccataacattcctagttgagaactgctgtgctaataaaatgaacagaatatttattactaagcctaatacctttcactcttccaatacaatagattttcctattgctcagtactattcagcaacaataattacaacaatactaatagttcctatttattgaggatttactatatatcaggtgttggactacttgtatatacctgtatgataccacataatccctgtgagagaaagaccattgttatcctattttgcatgtagaaaaactgaggctgagatgggctataaatgtaggatacttgacttgctattcatcatctgcacattatctcatggggaggaatgttattatattatacatcaaatttatataaggttcccttttgtattcattcattcaacaaacaaatattaagagtgtactgttggggccaggcatggtggctcacgcctgtaatcccagcactttgggaggccaaggcgggcagatcacttgagatcaggaattcaagaccaacctagccaacctgatgaaaccccgtctctaccaaaaatacaaaaattagccgggagtagtaatggacacctgtaatcccagctactcaggaggctgaggtaggagaatcacttgaacctgggaagtggaggttgcagtgagccgagatcacaccactgcactctagcctgggcaacagagcaagactccgactccaaaaaaagaggagtgtactgtttaccttcccatgtgctggtcactgaaaaaattagacgtaccatggaagtatgtctaattacctccatggtatgtctaataccatgtctggtgggattccccaaggtgaaagactcatgagctggacatggcaatgaaggcctatgaactagaagggttgaagggacacagatgaagaagaagctggaataccctgagatgtagtggtttgggaagggtatctagaggaggaggcacttgagctggagctgacaagaatgggatttccagggcttagagtcccaagtcagttggcagctttgtgggaaagtctgggagacatcagggcatttggaggaggagtgtggttggttctgagagtctgggacccaggagagggatcagggagacagggaggtaaatgaggcttgaagcacacagagccttgaatactgggccacggaactctgttctgtgggcagtggggagccctgggggcaatggggagccatgggaaggctgtgggctggggagggacacggccagctctaggtatagaaagatctctctggggctaaggtgggaatggatcagaggagggagactggaagctgggaggtttggaaggagtctggaatgatggtccaagcagaacaagatgaggcctgagctggggctggggctgtgaagatgaacaagagaggatgaagaagagaaagcagggggcagaaggaatgaagcggaggctatgggtggtggcaggggaagaagacactgtttggagctaaggcctggtgactgagggaatattggctttttggaggaagatgctaaattcgttgtggaacttgatgagagtgaaaggcctcagggacaggcagaaggaaacggccccagaggtgcatgagacaagtggttctcagtccacagggtcacccaggggccccagggcttatgggaactgtagcttgaggtctatggggacccctgctccattatacaaatgaggaaactgaggttccgagggagtagatgagttgcttaaagtcaccctgcaccaggtgcagtggctcatgcctgtaatccccacactttgggaggctgaggcaggaggatcacttgaacccaggagttcaagaccagcctgggcaacatggcgagaccccatctctacaaaaataaaaattaaaaattagcccagcatgatggcacacacctgtagtcctagctactcgggacactgaggtgggaggatcgcttgagcccaggacattgaggctgcagtgagccatgatcacaccattgcactcctgtctgggcaacagagcaaggccctttctcagaagaataataaagtcaccctgggagcaaagaatgaccagatgattcttagctgaagaagtctcagccgggcgcagtggctcacgcctgtaatcccagcactttgggaggccgaggcgggcggatcatctgaggttgggagttcgagaccagcctgaccaacatggagaaaccctgtctctactaaaaatacaaaattagccaggtgtggtggcacatgcctgtaatcccagctgctcgggaggctgaggcaggaacaattgcttgaacccaggatgcagaggttgcggtgagctggagatcgtgcctttgcactccagcctgggcaacaagagtgaaactctgtctcaaaaaaaaagaagtctctctccttcatccttttccactgcttagtgccttcccactcgcccccagccctgtgccttcctctcagcacatctggggctgttgtatccagggtggctgtcaagcaatcccgattgctagaggtcccatcacatggacttcaccccagatgtgatggtccatgcaggagaggacaggtgtaagggcagaaagagtgttccctcccgctctgaagattcaagtctgctgaaataaactgacaataaatagattaacaaaataaaaggctacaaatatattaatgtgcatgaacacaggagccatgcaaaatataagactttttatacagggtcagatggttgaggcttaagtatcctctttataggggagagagacaaaaaggatgtattcaattgtgagagatagtaaatgattttcaggggaaaatgaatgggcccaaagagtaaactgtagtttgtaaatgatcctctttggaaactgaataggaccaaacatatacttattataactcacaacatcataggaaacaggtatgtgaggtgtcctagtagaagccaaggacatggatgccgaggagaaggcagcctgcatgtcagtgtttggcctcagtaaactgtgggaaccacttaggggttaggaaagagggaagaagccaatccaagaacaaggtgacagccactgcatgagtctatggggacaaaatcctaggttgagcccctctactgagactcctcctcatccctctcttcagagagcgcatcctctctggaaagctggtgcgcagagctgagaagcggcttaaagaggtggtgctccaggtggaggaggagcggagggtggctgaccagctccgggaccaggtaagcagctggcatcattagggagcagtggagagtgtgaccactggctgagaaattgcacaggctgtctccagaggcaatgagctcccatcacaagaagcaatgtgcaggtgctggactggaactgaatgcagataccatcttggcacttggcacatcagcagagggttggaatcagtgagtttgcaattcataaatgctggcatctagaaagggccctgtagggagctgaggaagccagggcaagggaagaagttaaaccctacccagaagctagaccaggactagcttctatgtaccaggcactgtgctaaagacataacatttactgtgtttaattcttatcagaatggtagaaggaaggtgctattatttaccctcttatttatgtgaggaaactgaggtacagaaaggtgaagtaacttgctcaaaattatttagctggtaagaggtggggtcagtattcaaacctcagcactctagccccagagtgtgtgttcttgattacttactgagcagttactgtgtcataagcaactgctttttaaaaaatacatatttgcatttcctcactagtcccatttcacagatgaagaaactgaaactttaagaggatatattttgcatcagagtcacagagatagagcctggatcagatcccaggtctgtctggacagagtccctctgcccttaaaagctcagctgtgctttattcgccattcattccacaaacaattattgagcacctgctatgtgccagacactgtggtaggcattagggatatggatgtgaacgaaacagaggaagtccctgccctcatggagctcacattttctgcataggatgagacgtaataaacctgtaaacaagcagataattacagattgtgacaagggctatgaagaaaaaaagtgaagagagaggaagacacagaggattggggaatcctcttcaggttgggagatcaggaagaactctttgagaaggtgacatttaaattgatacctgaagggtgaaaaagagccagtcagagggaacagcaagtataaaggccttgaagaatagaaatacgtttggtgagttcagaacaaaaagcagattagtatggtctagataaacatctgttgttattttagtcctggtctagcttcttggtagagtttaacttcttccctcactttggctgcctcagctccctacaagggcccttcctagatgccagaatttataaattgcgaagtcattgattccaaccctctgctgatgtgccaagtgccaggatggtatctgcactcacttccagtccagcacctgcacgttgcttcttgtgatgggagctcattgactccagaaaatgtgggataggaaggctgaacgataagaaatgaggtcagatcatgtatgttccctccctgaagagagaggtggtagggtctggggaggatctcagtgaagttggtctggacagtgggtttatgggaagagagaactggacaagaaaaagaccctgtggggcctggaatgccaggctgaggggctggaaccttgtcccgggggtactggggagccatgaaaggattgtgagcaggagggtctgggtcagctctgggtataggaagacctttctgaggccatgtaggagacaacctggaggggagagactggaggtcagggtagaggctggcatgagggatttaggagaaaagaacaaggcctaaacagagagcagaggatggggcagagagagtcagggggcagtagggatggggcagtagtgggctgttggagagggagggagtgatgacagtacctggagatataacccagtccccctgcttccatcaagctggagaagggaaaccttcgagtcaagcagctgaagcggcagctggaggaggccgaggaggaggcatcccgggctcaggccggccgccggaggctgcagcgtgagctggaagatgtcacagagtcggccgagtccatgaaccgtgaagtgaccacactgaggaaccggcttcggtatggtcatcccacgtacaggcctgacgggtggggagcaccctaactccataaaccccagggacgcgaggccgtgccaggggcaacaacagggggaaatgggatccacgggggtgtggggctgtgggagcagcggctgtgttgcgggagagccaaatccaggtaacttctttcttcccacacccatttctccctgtcatctctgtgccctcctttcccaccgtgcaccaccacctttctctcctttcctcctctctgtgtgtccttcatctctctctgccccccattgcttctgcccgtctccctccatttctcttgatctcatccctctcttcccccttattttgttctctctcttcctatctctctctctctccccctcatctctctctctcctccccctttctcctcccctcccctcccctcatttcatctctgtatcctggtctctcctccccacagacgcggccccctcaccttcaccacccgcacggtgcgccaggtcttccgactagaggagggcgtggcatccgacgaggaggcagaggaagcacagcctgggtctgggccatccccggagcctgaggggtccccaccagcccacccccagtgaccctaccctgtccccagatgcactaacagatggggcccagcccccttcctccctggaccccacgggcccctgtcccaggaaccccgccctctgacttcttgccctttggaaatggtgcagcactctggcatttatcacccccacctgggtcccctgcaacctcccatcaaaggatgacccctaaacacagaggagcggggcaggcagggaggcaatgactggagctaccttgcttgttgggggactgggtacagttggcaagctgtgtttccatcagctccctgtcctcctttcttccctcgttattgatctatagacattaggaagggagtgagacggctcctccaccatcctcagccagtgcaacccattccctctgcttctctctctctctctctctctccctccctctccttccctaccctctcaccatctttcttggcctctctgagggtctctctgtgcatctttttaggaatctcgctctcactctctacgtagccactctccttcccccatttctgcgtccacccctgaactcctgagcgacagaagccccaggcctccaccagccttgaacccttgcaaaggggcaggacaaggggacccctctcactcctgctgctgcccatgctctgccctcccttctggttgctctgagggttcggagcttccctctgggactaaaggagtgtcctttaccctcccagcctccaggctctggcagaaataaactccaacccgactgga

SEQ ID NO: 240 - DNA, 63720 bp, Homo sapiens
  source 1..63720: mol_type = genomic DNA; note = NC_000001.11:66924900-66988619 MIER1 [organism=Homo sapiens] [GeneID=57708] [chromosome=1]
ggcggaggcggaggggagggcagagggttggtggagctggaggaagctccggacgacgactggaagaaggaggcgggcggcccgggcctcaggcccctcccaggctctgagtctcccggctgcaggcggatggatggggcttcttcaggcggtggcggcagcagcgaaggtggcggcggcagcagcggcagcggctgtaagtgcagcctccacaagccatctctccccttctattccagtttgggatgaggggctcctgaggtgtcctcagtcccctttctctccttcccctcccccacggcagtgtaccgcccggaagacccttaacttccggggaggggctgccgcagaacgcgcctggcttgctctccgccggctgccaaaggcgcatgcgcagcttcctccctctggccatcgactgcctcccagcgccgcctttttgccttcgcggtggtggcgccgcgctgggaatccgctgcggagtgagttcgcctcgccccgttcgcttcggtccctgatcccagtcggggtggggctaagctgaccaccctgctgtggctccgcctctttctcctgtatttccctcacttgtgtcccatccccgggaggctctcgcttgcactgcagcctttatggtgagcagcgccctgggccaacttgcccttttcggatggagtcagggagggaggagagactcgaatagggtattactgtaaggaaacgaggtcctcctagcgcgtgggaggatcccttgggacagatgcccgccgctctttactcttgttctttcagcttgtagtggctaggtccctggcctggagcctatctgtggtccctgcatgctgtgtaaccttgagcgagtcactatccctctctgggcttcagttttccctatttaaagcttcctccaacgctagaattctgcatttctgcagaagaacttatgtaattacaagattgacttggctattgaggccgcttcaccaagatgacccggagttgactgaaccttcttcacttatgggtggaatgaggcgacctatttattgggtcgcttttattcctttatcattagttacaaattgcatgacttaaggctcattaaatgtttttctaaaattgtcatgggatccttgtcctgattcccgaccatctttttaaaaatgcgaaacagggtggatggtgagcttgtatcatcgtttctgtctccttgctactgaggctctctttcctttgatccagatggtgtggtcgctcgattctcccagtgcctggctgagtttcggacgtggttaagaaccaactggttgaggttcaatgcagacaagacggatgtgatgctggtaggcaggggtacacttggagattaagggagggaaaatccaaactccctcaagtaatataagattatattactcttcttatatgttccagtgtttgagaactgatgggccaaaaatttccagaatttgggtgagataaaaataacatgtcatcaatgtaaaaaccataatcatagtttgtaatattctgataaaatggggccactggataaaactgtaaaaattatgaaaagaaaatccaaaactgttatttgaagaaccaaaagcctatataagtgttttagagtggcattaataacaaaaaatgaaactaacgaaagatgatgctgattgtcactatagatgtggggcttccaaatgtaataggctaagttttttagatgtaggtattttcaaccaaattagtaattatccataaaattttaccaccacatcataaagacatggtgtaggctgttgcttttaaataaaaatttcaggaaatagtttataaactaatctcaaaagagactcatggacgctgaaaattgttagatatagaattttttagttttggatgtgttgtattaatctatttcagtcagctaaccccagagtctaaattgttataagtacagtattttcttggtgcattttgagaggtacctttttggattgcataacagataggtttatatagtatatatatatatgttacttgtatttgaatcaggtgttggtactgaataaaaggttatatttcttaggtatatgtaaattgccaaagaagtttgttcattggttcgtttaaggtactggttgaagtaagattgtgctcctaaatgcttttgttaaaagcataataataactgaggggtttgtgtgtgcgtgcgccttatagcctctatagaattgttcaataacttttgaatggaagattcagtaaattgcttacaaatgatttatcaatataatagcagttttgagtagcttaatgtcataaaaattaatgttactttgcctgaaaataaggaggcttttaggtggggaataggagctgaagaggcatttattcaggctttgtatagtggttttttgttttgggacattaatcacaaacctcacataaaattggaattcagcacacttttttagtttaaaaattttatacacaattccaacagaactactgttttggatatcacattaataaataacaaagtgtaataattttaagcagacacaattaatggtgcattttcttatgcctttagctctctcatgtcctattttcaactcttctagtatgaataggctttaaaaataaatttttttttgttaacccaagtataaatattaactgtttgcatttggatacaaagaagatatctgttgaattaatccaaagtgctgaagaactaagggtaatggatggaaacaacaaggaggtagattctggcataataaaagaaagaatgttttaaacatttgaactttttttgaaaagagcagcctttttatgagatatagtgagtcactggaggggtttaaacataggcagaaagcctggtagtagaagcatgatgagagattactatcttgacagggtagagaattgactaaaagatctctaaggtcccatccaacactaaaattctataactagtgaatagttaatttttatatatttaatactgaagagggtaagtaagcgttttgagaaagacttttcattccgtaaggtggctcctgaaaattttacagttaggtgtatcactaaaataaaataatagtggaaggatactgaattcagtggtaatgtgttacctatgaattgcagtattagagctgtttcttttttataatatctgaacctaaaaaacccactgaatccacatttataaaaaggggaaggggaaaaatgtagagagtttttttccctcaataataataataccatttaaaactagtaatattgatacacaatattaataaacttaaagagttatttaacagtaagatagatacccattcagaaatgtttcagacttccattttcctgacaagtttaggattcattcagtaggttaatagactatgatcccctgctctttatcatagttgggatttctgttggtagtttaactgaagaatcaaagattcagtgtacttaagcaagttatttctgtaccttgtattgtaacacttttaattttcctttggtagccaaatttcataaattagctttcatatgttaatggaaaaccctccttcatctccatggtataaagcctgagtttgtacctctaggcccctaattgtgtctgtacccacctcaggtccatgtatatccattgttctttgccttcagctcttttcattaagtgtattgattgaaaactatttggatatgaactgacacttttaaaaagtcatttttatttcaagtccagaggattgacataattcaacagggtaactattagaaactatatacctctgctaaaatatttattcccccaaggaatcctgaaaaacacttttatataagttttctaaaaaataaaatgaaaatactgtacagtacagttaatggtaaaaattgtttgtagatttgggaaccttaaagttttcctttctcttctttcccttgcttttctttcagtagaaaatgtgcatcagatgtttatgtttaattggtttacagactgtctgtggactcttttcctgtcaaattaccaggtaatgtcctttcacttagcagctacttcatatatctgtaaatgcagtttattcatgcacagattattattggacataacagtttcaaattaacattgaatctttggaaataggaaaatgcttgatagagtctagaattttaagggaatataaataatttaatagcctcccctatattgcattataagttaagtattaactttaagaaaaattgtatatgtacacatttatgcaatgtagtattggttcacattatttggaaggaatgaataattctcgtatttaaatggttgattttggtagccacttttgaaactgcattaagaggaacccttgaagattaggaaaaaaatcccagtcttttgaaataaagactttcaaactggtttagtaaaatatgttagtgactgttttaatgtcacctttgtgttattcagtatgtgccttagtataatggaagtgaaacatgttagttactttgaaatcattggttctggccatcatcagcattggcatcacggccaattggcagctgtaggccaatacattaaaataaactttcaagttacaggcatttcaggcattgcaaataagtaggttctccctccatgctactaaatagatgatatccataaaacagtcaattttcagtattttaaattttgtctagttgtgcaaaattcagtacataactgtgttgctaccggcatgacagaagtgtgtgagaaaacgcaaatgacatgaggatggcggactgcctatcataaccccttccattaatttttgctctgacctctctagagatttggggatatagaattttacatttcctgtcgggaatctactgatggagaaatatttgtcaaggcataaccgctttcaaagcacagttcttgccgccgttgcatcacagcaacatccgtttttcagcaaatgcatttcaaaaacgacctacatgtaaaatattacgtatttttcctctgctgtgtcaatgctggatgtgactcctttggcactgttccttgacctctctgatccgtagacaaccccctccgcctggagtggcggatcagctggagccagcgaagcgccccgcgcggttgcccacctcctcccacacccaccttgactccgccccctccgctcttcccggggagggctggccgcggggccgcgcgcgcgcccctgctccggcgcgtgctcgctggtcttttccctccagtccagcccagccggggcgccgcgagggggcggagtggggtgtggtgggcgcgctcgggcggctcctgcgcgttcccgccgaggcagtggcggcgggagcggcagagacggcagcggccggagtcccgttgctgagtctcacatccgggttctggccgtgacccagctgcggccgccgcggagatgtgacccggcagtacggcaaatatggcggaggtaagggagcgagctccccctccctgtcccggagccgggcgcccccggccctgggccggggaggagtggagtgggcctggccaggagaggcccggccctgctggcgccgctgcccacctgttgtccggaacaggccattctctgggcgggagcttcgcctggaacttagttgggatgggtccgggggtaggaggaagcggaggcgtacttggacttcgggggcagtttgaagggtagtgcagcgtagtagtgcggtgcgagggggagggggcgcccgccggggaaggggtgcctgtggcgcaacttcgccggccggtgctaggggccaggagagaagctgctgcttcctcttgcgaagttttttcccttcctaaccgagatgctgttgcgcccttccgcgtcacccccatccatttgcgactgacatccagtctgtgttagtggggaaaacgtaaggctgacggcctttgattaactctgtaattttcatgatcgtggtaaaatgagagtggataaattaatctggccagccgcaatccagccctccaggttggggggagtctgcccatttatccagacagttccatctcccgctccccaaggtacaacctctgagctgcttttccacctccccccaccaccttcactttccaggcttccccccaccccctttccaaatcaaggctacctattcttgtcttctttctcttctaatttttctttcattggagaagctttttcttgtttctttttgctcgttttatagtaaacaagttcctaaagcccctttttttgattttacatatttgggccgcagttggcgggcatacaactgctgttgatttattaatcggaactaagtatacgctactggaactttaaataactggaagtttaaaaaatgtttaaaatatctgaagttttgtgggatttgttttgtttccgtttttccttacccgtggaagaatttcagtattctttattcctgagagttcgagatgatgtatttggattttttttatgactcctttgaaataagccactgtaaattttgattgataaggcatttctcttgtttgaattgccattttcatggtttcacaggcaccccaaaacagatttaggaaggagggtgagattttgctgtagcagacaggactgtttgctgcgagtattctttttaaaacattcaatatctctaatttacaactaaatttagatcttagatttattttcatttcttttgctcttggtggttaaagaattgtatttccaggcacatgaattggagaacgtagtactttctgtttccccaaaatgtgactgcgtttgttccagtagactgagaatcggtacctggattttagtcctggtgaggttcttattcttaagtgtttgtttccttcatgtttaaggagttgtgtgtagctggatttatacattttgtcagttagtgtcttcagtggacccctttcagtgaatatcgggtaagcagcaatgtgctacataggtaatgtggtttcttctttcatggtgttgctcaggatggtttgagctttgaggtgtgtagtcatatactaaggcaagatattactgaaggaaaatagcttatacagagaaatttaagttaaaaaacttaaatttaaaatttctgtgtttttaaaaaataaattttattgccgagggaactaaaaaatctaatatgtaaaagaaattatgttaacttttttgttttaaaaattaaagatggttgcgttattgtaagataaaggaaaaaaatattttgattcactaatcatttcctaatattttctaatgtatgttttagttttcttaaatattttatcagttggagaatggaatgttttgtgggaacgcatggattgttcaactgcaagaaggaaagaactggaattttgtttttatttggtttttagtgtttatttaatgacctggtatctttaaacaatttatcttctatattcttcagttacttgtagatagtttcatgtatagtgaattggggaagagttagaggaactttcgtgatctgtgtcctacaaaaaaatctaagacaggtgaagaagtgaaaagtacaattgatttatagttttcctggcctcaatacttgaataattatgacgatttttgagaccagtggttttaaacaattagacaaaggagaaatgcttggttggcttttactttgagctctcagtagattcattctttatgaagccaatataaaagcatgtgattaaataatccagatgctgaattattgtgcttttgatcaaataaatctgaggatttaaggatagcttgtgaagtaacagtaagtgcaaagcaacagtatatatctatttgttaaatctgagggggaaaacaggttattgaagaagtatgtctccagagaaaaatgtaggtattatgcttctgggcttttaaaaaaaaaaattgatgcttcctacaagagcatgaccctgaccatgtttttccagaaaaatatttaattcttgaatagaaagtgctttagatgagaataggatatactaattttttatatttgatctgattatcttagtccataataggaagtatatattggttcttcagttgtgataacattaaagccgtatttaatgtacttagaataaatagcatatgctcccttgcttaatactttttggcaatatttctcattgcttattatcccttaaaattatttaccaaccttctaaaaggacgctctcctagtcacacttgaaggaaattacaggatagttgcagttttactaactgcaaaaataagaggaaaatgagagaaaaaatgagaggaagaaatagttaatcctttgggttttataaggaatgtactagggacctttgggaacgaacaatttgtcttgtattttagcgtttgtaaacacgtaagggactttcttctcaaggaaaaaaatccatggacaattcaagacctgtcttttcacctaggccacatttctgtgatataaagagaaaattaatggatttgcttctttctatttaagtattttagtactttcaaagagggtatataatctgtttattcactttcacacctatccatttctctttaaaatggactccttgcttagtattttttgagtgtatttggatttttttaacgaaggattatgttaaatgttacttatgaaaacattaatttctactctaagcaaaatgtgtttcactgcagtgaatttaagcttcaaataattctcgacactaataatgaattttttttcatgtttatacttcagagctattaagattttaaaagtagtcaagatcaccagtgcgtgagagtcctaaaaatcttaattcattggcagttaagagttagggtactttaataggtgggaaaggtttggtgggagaaacaagtgaattactttaagataattctggtaagtgagactaaccagttttctaaataattcagaaataaaacactgccattgaagcttaagcatgtctttatgaaaagtaatcagctatctagaaatgcctgcctggcttgatgttcattcaaaattcattgcagtgattaaattgttcaagtaccagtcattgcttggggcttgttctgtttgtcttattctgtggcttagaacaataacttattatgtaggtatgaaattcatgaagtagcaccccaaaaaattgtttttgcaaattgagatttttttaacagtcctagatttaaaaaaataaatttaaacatatcccatgcatttagctgcatactccttagtagtgttaggtttctagagcaatttataataaaagtaaagttaggtcttgaagaaatctaaatcttttgatcatagagaaaatgaaagtgagcagagagtttacgtagtttgtcctaggtcgtgcaattcatctatggcacagtttagactggaacccagccttctgtattcctagattcctagtgcttattttctttttctttctttcttttttttttttttttgagacagggtctctctctgttgcccaggctggagtgcagtggcgcaaatcatagctcactacaacctcaaactcctgggctcaggtgatcaatccttccctcagagcctctcaagtagctgggactataggcatgtgccatcatgcccggcttttttttttttttgtggagacagggtctcgatatgttgatcagactggtctcgagcttctggccttaagtgatcctcctgtcttgtgctgggattataggcgtgtgccactgttcccagtccttattttctatgatatcattttacttctgaattattaatactgtagtaaattgctaattttaatttcagtacattcttaacctttttataccccagaattcctgagagtaataacaaagttaagtaacttaattttattggaggagagggatggtgagccagcccttggcacggtaaccatctttcaccctaaagtaggacccctctttccaggcttctatccccatctccattgctgtgagaatctctgacttagagtctacataactaagtagatgacggcaatacttaaaagaaatggtggtagaattgttttgaggggaaaaatttgttcagacggtaatactcattgcaaataagcttttgattgcctggaataaaaaaatctagtaattacttcatgtttttactatgttgttgttagggtttttttggtgaaaataatggtaatgttgtagttagttatttctttactctctctcaaattatagtcttctgttgtatgggacatttcccaccatgttctagaaaaatataaaagagaattatttcagcaaatctgaggcattgaatattcgttacaactattagcaattttatcaactaaatcatacaaatatgtgggtgagggtcaacttgctataaaagttgctagagtttgtttttaatttgttttagcccattcatactctgtgtacagtctttctgtctctctagtgttgttttccatctcagataagataaatatgtaccccctaaaacactgaatttttcaaaattacagcttaaaaaatagtaacaagtactaggttttcttaaaaatcaaaatttagaggaagaaaatgaaaatgtctcataattccacaagataatcagttcccagtgactttcattttaagaaagaatgcatagtacatgaaagtggttagaaaatttcaacagtacagaaaggtattaaatgaaaaaagcctcttctccctgaccccattccctagaggtaactattgttaacaggttcttgtatgtccttttgaggaaaaaaaatttattccatattatttcatattccagcccagtttacgccctgttctacagttttctttatactcctaattttttttggcatttatttctctatcaacacaaacagatatctctatttttaatggagtcatagtgttctattgtttggaagaactatgtatggaagaactatgtatcatttctaatcagctaatgcatggactttaaatgtttttctacctttttgttatgaacaactttgtggtagtgaatgttttatatatatatgtcttggtgtcttttttaaaatatatcagtaggataagttcaggttagcaaaatgatctccagtgtggttgacataacttttttctactgataaggttatgagtacatgttaaatatattttaatgcccaattttaaatcatctttcctaaaaaaggtattttttctaaaaataggtattgttataaataagcacttacttagctttagtttagttttgttttgtttttgttttttttgagacggagtctctgttgcccaggctggagtgcggtggcgctttctgggctcactgcaacctccgcctcctgggttcaagcatttctgcttcagcctcccaagtagctgggattacaggcgcccgccaccaaattttttattaaaaaaaaaaaaagtttttgtattttagtagagacagcgttttgccatgttggccaggctggtctcgaacccctgacctagggtgatctgcctgcctcggcctcccaaagtgctaggattacaggcgtgagccaccgtgcccaccttagttttgtttttctctctcctttctagtttatggtagtaattaatggtagatgttgtgggttctccaggaaggtattgttaagataacagtttctgaagactgataagtctgacatgacagatgactacttgcagtcacattttaaacatactttgaactgatgaaaatcatttcaaaaaagagaggccgggtgcggtggctcacatctgtaatcccagcactttgggaggctgaggcggacggatcacgaggtcaggagatcgagaccatcctggccaacatgtgtgaaacccatctctactaaaatacaaaaaattagccagacgtggtggtgtgcacctgtagtcccagctactcgggaggctgaggcaggggaattgcttgaacccagaaggccgagattgcagtgagctgagattgtgccactacactccagcctgggtgacagagcgagactccatctcaaaaaaaaaaaaaaaaaaaaaagagaaaaagaaaaaagtgagggtgaaggaggagagaagtgaagagtggaaaattttagcagttatttctctagaaggtacaaaaggacactataaaaggtatagaaggaagagtcagggtctagacttcaggcctgccttcaccacctaccatggaaccttgatctagtcagtgtgtctccttgggtttactaatttataaaagaggtgggcagggcaggtattattcctatatttatgattatgatcagctaactagatgcttttgaaaatgtgtagcactgggttgggcatggtggctcatgcctgtaatcccggcacttttgggaggccaaagcagggagatcacttgaggtcaggagttcgagaccagcctggccagcatggtgaaaccgtctctattaaaaacacaaaagttagcgagccatggtggcgcacgcttgtaatcccagctacttggtaggctgaggcaggagaatcgattgaatctgagagatggaggctgcagtgagccaagatcatgccactgcacttctgcctgggtgacacagcaagactccatctcaaaaaaaagaaaagaaaagaaaatgtgtagcactatatgaatgtaagctggatgtactattttatttcatatctaaataaaaattacccttattccacacccaaacttcctatattaagatgctaaactcacttgttattttgaaagatcatcatttttgataattagctatacaaagtaatgttttacagtatgaaatgttttcaaataccaattttttagaaactcatctttgatttaatgggatgtatttaactttaaagaatctaatctcaatcctacccccaaacatatagaacagaattttattttggaagtaaaatactaaaatatgtatggatactaaatgtatctgtaggcagaccactcctagttctccacttgtgctaatctagatatgcctttaaatcagtcattgaaacattctagtatgtctgacataatcactaatgttacctttgaacactgggtgttctactctgtatcagctatgcttacaaatgctactagtcctcaagcgtttggtatcttaatcattgggaagtgtttgcagcctttttcagaactttaactatttaccaatgaagcaacaatcagtaagatatttattggcattcagtgctcctgaggccttttacaaactgaaatatatggacaccatttacaattcaaaatctctattgttaatatctaacatcaataaaaatgtaacttttattcttcagtaacttgtaattagaaagcctttttttaaatcagagaactgttaaatggaataattattccagtgttcataagtcttattttgtgtggatagtgagctaggattagatgaagatgatcattaacattgcttgtagccttacagagaagattgtgcctacagttgggaagtataactgcgtgaaacacaagtggattaatattttaaaatattgatttactatgtaataatttgtgtggtggttaactccattttgaaccagaaatgtgtagctctgcccaaaagatgttaagcaagctagaaaccctttttgtggttgcattactcttgtcatgtcaccctactctccaagcttcccattagaggaatgagatttaaaagtagcactgtattgactgtgttctggcagagtaactttaaaataatggtagtggtgtaccattggaaatatgcaatactggttattgtcagatttttgctagacaatgctataggaaggaattattctaagaatttaacagaaaaagtaggacctttgaaaaagtgtgccacaaaagaatgagtcaccatatggaatctagaatcccatacttactacaattacataatatgtacagttttaaaaacaaattttaatactttataggaatttgtcttagacacattgtttttgaaaaatagagaatttccctcttttctgttttcttcttgcctctcttccccattacttagcagaaagaaaatactgcaagatccctatctttcctttgctagtgcttttggcctcccaccatctgtattttctaatgggcatgaaatagatacttctgaatgaattggtgaagttttagttcatgttatttgaagcatcttttgagtttttaatatttgttttgtgggagtcttatgtttgtagattatttgtttataattgtgaattaactgaactaagataaaacacaactgcgcattgtcaagcagtaacattactaaaataaattgctaccaattttatctttaaattttcaagttgtttgtggttaaatttatgacaggtagaatggtggagtggaaggagcattataattggaaatctgtgcagtcttgcatcagataacctaaactttctaggcattagcttgaatgcttgctaattctgttataacttaaaaatatattgtttatctgtaaagttaacctaatatagtatttggtgcttaaacagaattttaatttttccttttgctttgttacaacttaatttttatttgagatagtgtcctaaattgtttctgtctcccatcttacactcactttttttaagtcggagaccagcttgatagcaaactttgttcatagttctgtgttgataggagaaaatctatttcagaaaattccaagatctaaaatcatactacttaaaccacatatgttatgaagcccacatgtacctttaaaatctgaattctatactattgtctttatttctggattcaggagtgtttggaatttttctttatgcttaaatataatgaaagggaagggattatatgggaagttttagtttgtcttggaaaatgcagacattaaaactaaaatgcagacattaaaacttactgtagtttttggcatcatagtagtcattgaataatttcggtaatgtttgtgaagatacattatacagaaatactaatttttcctcttttctccccttctcagccatctgttgaatcttcaagtccaggtaagtattttccatattttttataatctcgatttgagtaacatttgtcctactagttgcataaagactagaggagttagactattatctgacttgcttttcttctgaatgcttcttttctctggggaaaaagaaatggatgaaaggtttgactgcccatgaaagtacaggtgaggctactgtgatttcatcctaaaaatgactatttttgggttttctttttttttttttttttttttggtgagttgccatatgtatttctcacagttttgtattattgtttgacttgtagtatatatataaattgtgctttttaaaaaggaatcattagcttagaaatatttgcttgtgtagggatttcaaagtatttttatttgagaaaaaattgttagtgcattacagagggaggggaaaaataaagtaagcaaacgattcaacaagtgaatatttaatgtaaataaggaatattctaaataaggaaatcattcttagatttgaataggatcaagttttaggttctgagcacacatctaggatttttgtattctttctcaaatacagtacatattcattttttcctaacttagagattgcaaacctgtgatctttgaatcagatctgtgccacaaatttttgtttggccactgtagtgatctttaagaatattttatatatgaaatctggatttagggttcccatggtctggcaccactgggtacagtagttctacatggcagtaattcattggagttgaagcagtgaggaaagagtcaagtactagtcttttatcctcagtgtccagtgactgtcaagagaaatgggactgccttctgcatgggatatgtgggttaaagagtagtccaatatagaagagtgagaaagtgaaccctctgaggcatagtaatgttttatttgaaaacatctcacatgtattgaatacttagataggatgtattctgtattactgaattttccagattattgaagcaatcacctttctgtgtttaaagttttagaaagaaagcttttaaaaatgcttaacataagataagcctgttttcatggtgcaaggtcctttctatgaacatgaatcactggactctgagggttggactagatcacatctacatcccttttaaatgactagtgtgctcagctgacgttgattttgtccttttgatttcagctgaaagcatcttactctttttaatatgcttgagagtaaagtacattaggctttgtgcatttctgaaactcaattttttttgaactttgttttataagtatatcctggatggttaagattgggagtaatctggtcttagataagtgttagatcaccatattcatttttaggacatggaattatttccgattttttttttcaaacgcagaaattgttttcatagaaaaaatagatcctacttgtttcttatagtattgtgatattgcaaataaaactgaggagatttagatatttctgatgaatttttgaggcattcatctgatagtacatagatacataaaataattactcagaaagcgatattagtaagtggctttctcagtttccattacatttgaatcagcctaggctgaactggaagaataatggagtttgaagaatacaaatgttggccaggtgcagtggctcatgcctgtaatcccaacactttgggaggccaagacggatggatcacttgaggtcaggagtttgagactagcctggccaacatggtgaaatctcgtctcttctaaaaatacgaaaattagccaggatggtggcacatgcttgtaatcccagctactcggaaggctgaggtgggagaatcctttaacctgggaggtgaaggttgcagtgagctgagatcatgccactgcactccagcctgagctatagagcgagactccttctctcaaaaaaaaaaaaaaaaacagtctttgatagctttgctacttgttgaatacttaacagatagaatgtttatatttcttcagcttgttttcagactgaaatagatcttttgagttagacagtatttgtcatttgaggcttctgcccagggcagtgtttattgttcttataaataatgttaattacagccagttataaaagttagtagagaaaattagaaatactcatgtaaaaaatttttcagtcccctgatgaaaaggctatatcctttgtagcatctgtactttgcaatcaatgctagtaataatagtcacatgaccacattaattgctttgtctgtagtctccaccagtgtaagacaaagtagaggcacaatgtaaggctttttacctgtaagactagtagccattagaggtggggaattaatggaggtgaagataatttaaaaagtgattaaatgagtagacatgatacaaactgaatttacctttgaaaagatgtaaggtaccttttctgcagtaggataggatttcatgacaaagcagtcacatttgcctaactctgatgcaaaatacttaatttatacaaagcaccagagccattacctctaatgatttattattgggaattttttttttttcctaggagacagcctaatggtgggtctagctattgacaagaataagatggttagtttgttctaaggaacaaggcaaaaagaagtcagatagaacaggtcagattaaggaaagagaaaaactgaaaattgaaagtttatagaaaaaagcgtagtgtgcatgtagggaaagaaattggagtgagacaggaagtagttcacctacactttgttgtttgatgtaataagggagtgaaatggcaagtcttcatatataattggctttgcaaataacaaaaaatggacttcaggtgagttacaacacatgctttgatgctatatacctatgaacttgaatttttttaaaagtcaatagagtgtaacaagtataacaaagaattaagcataattatttttgataatacctgtgtctaattacaattatattctgattggataatagtatacaaagggatggtgtggggattttttagggtctttctgcctacaagggagaaaagtatagcattatttgtagggatacatgattactgactgactactcagtatcccagaagattgctgggtgaactaaaaagtttgaggagagttttctcttgaaaactcagaagagaaaaggattgggacagaaaactacacctatattaatgtttctcaaattgtgctcctatggaacccttgtgtccattgcctcaagcagtactaagatgcactgctaaaattgtactaagcttttcttaatttctggaagaaaattaagataatatgcttttctaaatgtttttatttaaattattctaaaactttgataagtgttaataactcatttttactataatctggtataaggtatctgatttggcatgtaattatgtttttagttattttctatttaatatcagttcctttcctttccttactatcttttcctttcctttcgtttagttttgtttcctttcgtttcctttcctcctttcctcttttcttcctttcttttttgagatgaggtctcactgtgttgcccaggcttgtcctgaacccctgagctcaagcagtcctcctgccttggcctcctaaagtgctgggattacagacatgagccactgcgcctggcctaataccaatattttctggtgcttctgaaagggcacaatgatgttaagtgctttgccatgtgacctggcttgcattcactcgtcttagtacatagactctccttaagtattctttgaggcagtatactaaaataatttacaggaggcttggagtccagtaaaagcataggtgttaggattagtatacccaggattcaaattccgtctttgccatctactggctttgtaagtttagacttgctacttgaaatctctaagccttgagtttttattttttttttttcctctttaaatgggatgataatacctacttcgtaggattatttgaagattaattgagataatgtatatgacatgcttgaacatagtatctggcatatggtaagcactcaaaaaaatgattcttttgaaaattattgtgagtaactgaagaaccctaagctttgggcattcccttattcataatagtcggattttcaagaagtcagctctatctctttgctttacttattgtttatctttctggagtgaaatgaaagaataggtacatctattaatgtctaaccatcaacagttaaaactttaaaaattgttaattttttcaatgttcagtaactcatttgtttatcagtaaacaatgcttttgcaaatctaggtccacattggcagtagtaaaacttggggatattttacatagtctgtaaaatatccccaagttttactactgccaatgtagtacaatattttacagacaatattttacagactatgtatgcccagcctttgcattctactattacaaagcttgaccctatagggtccagcaatattccccaaccacatgtcagttagacatgtttattagactagattatttttaatgcctttgataggagttctctatgcagttttaataaattttgctcttctactcagtctttggcgttatttctgatcaaaatccactaagttaaggacagctactcaaatattagatttttttttatttattttttattttttaaagtcagggccttgctctgtctcccaggctggaatgcagtagtgtgatcatgactcactgtggccttgacctccctggctcaggcacttctcctgccttagcctcctgagtagctgggatgacaggcacacagcaccacacccagctaatttttaaattttttgtagagacggtgtctcattatgttgcccaggctggtctcaaactcttaggctcaggtgatcctcccttcttggcctcgtgaagtgctggtattaaagcatgagcaactacatccagccactagaatgtattttcaaggaagtacttatagaataataatatttgagtgcagctgtgtcttcactagactgtgtattcagatgactgtatatttcacatgactatacagtcatccttcgatacctgtaaacctccctcggataccaaaatcgtggatgctcaaatccctgacacaaaatgcatagtatttgcgtgtaacctatgcacatttctcttatatgctttaaataatctggtgtgtgtatatatatatatatatatatatatatatatatatatatatatatatataaaatacctaatataggtaaatgctatgtaaatagttatactgtgttgtttggggaataatgacaaggaaaaacgcctgtacgtgttgaagacagaggtttttttgtttttgtttttttctctgaatgttttcaatctgctgttggttgaatccacatacacagaagccatggacatggagggctgactcacagtctcctcatgggccagaggagttcatactcattggttctatcaaacattaatcaaatggttaagaattgtgatttttagggccaggtacacctgtaatcccaggactttgggacgccaaggcaggatgattgcttgagcctgggagttcaagaccagccagggcaacatagcaagaccctgcctttaccaaaaaaatattaaaaaattagctgtgtgttgtggtcatagtcccagctactttggaggctgaggtagaaggatcgcttggccctaggaggtcgaggctgcagtgagctgcaccccagcctgggacagagcgagaccctgtctcaaagaagaagaagaaaaaaaagaattgagacttttttccacacgaaaagcctgttcttatttgatatgaccatttattatttacaattttttcatatttataacattataaacacttttaaagctataaacattttccttccatttttctgttgtaactattaaaaagcaatacataatagttgctgtgcgtagctttttcttggtacttttgacttacatccagcatcaaataaaaatatatacattaatattaataagatccacttaatttggtttaccaaactttttgaaatattccttaccaggaggttcagcaacatcagatgaccatgaatttgatccatcagctgacatgctggttcatgattttgatgatgaacgaacattagaagaggaagaaatgatggaaggagaaacaaacttcagctctgaaatagaagatcttgcaagggtaaataacatgtagagctagggtatgaattggttatgacttttttgtggaaagggaagatctgaaattttgattctctgattaggagagaaattgtgttatatattaatgactgaaaaattttgtgtgatcataggtgggatatttaaagtttgaaatgaaaggatttaaaaacaataactttattatgtgcaataacagaattcacatagttactttggtaaaacatagactgttaaatgattctgctataaaggtctggtcaaaaatggactataaaaggattctacacggcctcatatatcctttgtccttccccagttaccatatcttttacttattctccttcagagccaaaaattcttgaagtatcattttccattcactacataaagtgctctagattatctccactacataaagtgctctagattatctccacctcttcctatcaaggtgaccagtgaactttccttgttacatccatttttatattcacttttctctcactaccttactttttctcagcagtattcaatatagtttaacattcccttcttttacttgaattctggagtacaccactgtctggttttctttatctttttgtttctattcagtatcttttgcagactcttcttccgttactcaaggtttacatgttggcagtttgtgattctcagtttggaccttctttttttctctcctgtctctgtctggatcagtgctcctcaaaatgtagtatgagggtcagttgcatcagaatcaaccctgtacttattttaaaaagcagattttttggacctctcccccggcatactgaatcagaatctctggaggtggtgttcagatccacatcttcattaagtaagttggcattatatgtacaccaaatttgaaaatcactaagctgtgtgatttaatttattcccttggtgtgtatatccttagtattctttagtttatatttctagcattaacctatttcctgtctccagttttgtttgtccaccttgacatttctgcttgcttaactaaatggacatctctaaattataaatgtccaaaacagaactattgactgttgtttttttctctgcttgttctttccctgtcctatcagtaaaaagtggtactactatttaccctgttgcctaagtcagaaaccagtgagtcattttccttctctttcaatatcttatttctaaataaacctatcatttgtatccacaagaatatcccttagccgactcttgatccattgctgcctagattaccattctttctagcctaggctattgcagtagcttcctgactggtttccccatttcctcttttaccatctttctcctgatacatttccacccagcagctgtgatcttcttttcaaaatgtaaatcaattaatatcaacctcccagcttcctgttatatccaaagaaaacccaaactcctcaaccaggccagcaaggccacctgcatgataatggcctcttacccatgtatcacactacctctgttatagccacactagctgcttttgttgttaaataggctagtttcttctgcttcaagggttttcagctcattctcactctctggtatatgcatcccaaggccggctccttatcctctgggttcggtgttgcctcctcagaatagcagcctttcctgtcccctaattaggttttaattagttttttgttttatttttatttttttttaaccactgtcccctattcaatgctttctttagtgttaggacacaatttgtaattgtttgtttaatttattgtctgtacctccactggttttgagaagatgaaataaaatgactgttattcaccagtgtatttcatggtaccttgcaagagtgctcactcaaaagtattgtatgaatgaatggatatatcagtctggtatgttctaataaaatatatcatgcatatgatttcctgtactccatgataaaaagaacataagaaataagacatagtgccagtctttaaggatttggaatacataatatcatgaaaaatgaatgcttatacttttatggtaataaagacctatgtctcataattttagtttgtaactttttaaagtatacatttaaagagctcaaaaaggagttctattactgtttattgaaatcttgtcaggtgttcccattgtgggattagagctggctttgggattagatcatttagtgattacagctgacttaatccacaatgtctgaataatttaatgtgtcaaaggtgtatattggctatcacaaaagtctttcaagaatgggttaaaaagcatatgaagggctgggcatagtggtttatacctgtaatctcagtacttcagaaggccaaggcaggaggattacttgaggcctggaggtcaagaccagcctgggcaacatagtgagaccaccatctctgcaaaaaattttttaaaaaggttaattaggcatggtggcatgcacctgtaggcccaacacttcatgaggctcaggtgggaggattgctggggtccaggaatccaaggctgcagtgagctatgatagcactgctgctctccagcctgggtgacagaataaaaatgttactactatttaccctgttttatttttcagagactgtgtgtctgaaaacagggcacttgaagaacttgaagtcagaactattgtttaaaagtaggaggctgggaagcgattcaaaaacagttataagggaaacagttgatttaacaatcatagtcacttcatgtatttgtgaagtgagaagacaattattttcagtttgcctatattcagagaagatctatcactttatattttttgcttctgaatagccatctgtgggataaaaggtacagtaataaaatcttgtattttctgtcttatattctatattagctaaaatactaattagcaagaggaaataagtagttttcataatgggttatgagttagttattttttttctatttcagaaaatgagatatttattacatttaattagtagaaaattactaatgggctgtgctaaaattttggttatatcattgccttttcctgtttttctctcctattcctttccccagccccatatagtgccttaaaacttgctttcaagtgaccctgccttaggaaatagaagttaaaatagaattatttatagagatagggaaaaaaagacagttgaaccaatcctttatcatcctttcaactagacagccttataccttctcagattcttctctgacttctcccagaaacaattaaagctttaagtagcatagaatgcttttcatctgtaacctgaagctaagcaatattttggggccaatttgttggatttcctagagttattaactctttaggtttgaaccaaacaaaattcttgttgtgtttattgaaaaagtgaataagattttgttgtgttgattattgatttgcttttatagaagcaaaacattagttatgtcagggattgatagtgtttttcaccttacaccttggttgcatgaaatgaatttttgatgtattgtggcagaactctgacattcattcaggaaatatcaataactgtatagcatgtggttttaagttcattcaatttgaattctagaatttttcagtgaaaactaactcgaaagaagttttgatgtgtattgttacatttgtatgcatggattatgacaatataaaagataagtgttttaataaaattgggtgtataggttattatttattgtagtgattagtgatcttagagggaatgtcagaatcattctcatagtaaataaatagacttttgttttgttttgtttttttgagacagagtctcactctgttgcccaggctggagtgcagtggcacgatctcggctcactgcaacctccacctcctgggttcaagcaattcgcctgcctcagcctcttgagtagctaggattataggcatgtgccaccaagcccagctaatttttgtatttttaatagagatgaggtttcaccatgttgcccaggctggtctcgaactcctggcctcaagtgatctgcccatctcagcctcccaaagtgctggggttacaggcgtgagctattgcacctggccatagatacatttttgtttgctacaaatagaaacactctagtttaactctgttttccaaatgaactctttaaactcagagactctaaatgggcacaattgtggcagtccatttgggaaaagaaagatcaagattgcaatatatttatgtatttagatatattttataaaaatcacactataacagtatcagtatttaatacatacttttaaagtgctagatgtgttccatccagagctagagaataattaaaatgtgtgattaaaatgtgagagattgcagtattttgacgtatacacacaaattaattatatagatagaaaagaaatctcagtgtgaggattataaagaagagttcagtgccttcattcctatatagttttatcttctagtcaagccccagccccaagagattggttaccttaggaaccatctctctagttcagtctggatgtggtcccttaggcctttttggctggaaatctgcctctttccttcttcctatcttcattagcattttattggtaagtcagttttggtacaacaggtgtaagagtactatctacatccaccaaatggccttgacttgaaagtcagcatctgccatttcttaatgactaacctcctgatgtgagggagaaggagctaggaactagcacctcttctgcagctaggagttggatgccactccaacctataatatgttagtgtttgataactttaccctattgtcttgaaattagggcagacttaacttgagatatagtatatagtgtttatcctttttgatacagggtcttactctgtcaccttcccaggctcatgtgatccacctgcctcacctcccacgtagctgggactgtaggcgtgcaccactatgcccggctaattttttatttttttgtagagatggggtcttgctctgttgcccaggctggtcttgaactcctgtgtgcaagcagtcctcccacttcggcctcccaaagtgctgggatgataggcgtgagccactgagtctggtcggtttatgtttttaaaaagtccatttctcccaccttcagccagccttcctttagcttatgcagacatgattgcccttccttttgttacagtgtaagacaactcatttcttaaaatacagtctgcaaatatagtgtgtattcctgttttttttttttaagttaattttttagagacagggtctcgttctgtcgctctggctggagtgcagtggtgcagtcatagctcaagcatccttaacttcctgcgttcatgcctttctctcgcctcagcctcttgagtagctaggactgcaagtgcatgccaccgtgcctggctacattcctgtatttttattcatcatgtactatgcccactttccttatttctcacagtttatcagccctcttatttcacattgtaacaggatgctgtatacttaacctgacgttagattttgaagaaggcagtatatatgcatatgtacagaagggcagtgtaaagcagtgagttagactgcctgggttcgtaatccagttctactacttatttcagtgtgggacttaggataggttacttaacattgttaaacttcagatgttattacaagaataatatatctaaagcgcttaacataatatttggcacataataaacacaaaataaatcttagttaatgtcattcataagattctcaaaaaagtctctgacctataactgaaaatgtacaacttgccacataattttttctttcactctgttctcgcctttttatactcttttaacacttacgtgaatgggaataaaacactgtgccactttattgtgatgtttcaatttaagttgaagtaagcccttgagtaactggtagaatgcagactttggtaatataaactaattagaaattctctggaacaggtgactgacaggccctggtacaatagtatactacttttggccaagttttattcatccttaaatcttttttcagagggaaataacggaatatttgcgttacacgatatcattactgtttatagcatcagaatttgggggtgcagagacagaaatctgtctgtaactagattacagacagtctaacctcaaactaggttagacaaaatgaagaatttcatgtaagtctcatggaatttcattaaaggagggatatatctgctcccagggactcaagtgccaccagaatttattttctctatttctgcttttctacatggtttacctctttttgtttttgagacagggtctcactttgtcactcaggctggagtgcagcagtgcgatcttggctcactgcagcctcagcctccctggatgaagccatcctcctgcctcagcccccctagtagctgggactacgggcatgcgctgccacacccagctaattctttttgtattttttacatggacggtgtttcgccatgttgcccaggctggtctcgaactcctgagctcaagtgatctgcctaccttggcctcccaaagtgctaagattacaggcgtgagccgtgtcccacctgacttgtcttttcagaccaactttcttcatattatgctgtcagtttgtaggtctcccacatttactacttgagatagtctatgcttctttcttaagttgctgttgataaaactccagaaacaaagtatggacaagcttgggtcatgtgtccactccaaatctacggccagggaatacagttattccaattatgtcagctactatggtcaaggaggtgaactttcaagaaaaataagtgcttggaatggaagaaagaacatttcatgtgagaagacaagtacagaagtagagagtaggagaggcttggaggggaaataataaataatccttacatgatgcttgtttatgcttgctaaatctttacttcagttagcacaaagcaggaacacaaatacatgctattgcaatttgaaacaggattcctcagcaaaattgattctgatttttattatagttgtagcccggagtttgctgcaagattttcacttttaccttagattaaataagagactttttatactgtcgtgcttcaacttgtatttttggtggtgatgattttttctttgttgcttactaagctgatattactcacttgatattgggtgacagcttgagttacaagtttaatactagtaagtaagcattttcttttccttttttttttttttttaatattcttgagacagggtctcactctgttgcccaggctggagtgcagtgacacaatctcagctcactgcagcccctgcctcctgggttcaagcagttctcctgcctcagcctcctgagtagctgggattacatgcccacaccaccatgcctggctaacttttgtatttttagtagagttggggttccaccatgttggccaggccggtcttgaactcctgatctcaagtgatctgtccccctcagtctcccaaagtactgggattacaggtgtgagccactgcacccagcataagtaagcattttcttgattgaataagtaagggtattttttttccatgtgataaagcccatctaaaaataacgttgtgtaaaaataaactattagaaggtatatgaaagtgtagttgggtacaaggaatatatggaaccagggattcagcatcaccaggacctccatctctcctaatccctggttgaatcctgttgcatctcttcaattttttcttttccacaaccactaatttaatttaggttctgatcataatacaggtgaatgtgtagtgaatgatagcagtggattcccacatggcaagcaaactaaatcttcccctgcctaagttcacgttgagtgttttgttgtgtgtgtaatttcccctaaatacttccagagtgtcagtaactattcagtacgctcaaattgagtcaggagtataacagaagcctttaaaaattacgtaaaactagagaaagtaggtaaaaatagtaatcctgactttcattaatctataactgatctttcagtaatgtatggccttctgaaatgatactttgtttttagttactgtaaatggtatgtctgctctaatcagggtgactggcttattcatttttgtttctgtaccatacatttgtcatttgctctgacttgaatgacttttctccatctgtgccagttctattacgattgtaattcaagcatttcccctctaaatgcactgtgatcaggctacttttgactctctctgttctctgcttagtcaatattggaggtgttggagaatttttctttgagaaatgaatttttttctttttccttttttttttttcttgagacagagtctcaactctgtcacccaggctggagtgcagtggcatgatctcagctcactgcaacctctgcttcctgcgttcaagcaattctcctgcctcagcctcctcagtagctgggactacaggtgtgcaccaccatgcctggctaattgttttgtaattttagtggagatggggttttgccttgttggccaggctggtctcgaactcctgacctcaagtgttctgccagcctcagcctcccaaagtgctgggattacaggcgtgagccactgcgcttggcctgagaaatgaatttttacaaagtgagtcacacttcttatctgtatatccaggagggaaaaaccttaatctatgattgtcagacattctacattcttgataatggttaaaaaagaaaaattctttttccatgtagttagtatgtcacctatccttttgacaaatatttgagctggatatcatatgtcatacgataagctttattaaagttaatgttcaagctttattacctcccattggaaagggtgatttgcaggtatcttatcccagacctgtgagatcagtggttttcaaggtagtctcataccagcagcattagcatcacctgagttttttttttttttttttttttttttttaattgcaggtactcgggcctcactggagacttactaggtcagaaagttgggtgaggctcagcagcccattttagtaagccctcaaggtaattctgatacccttaataagacagaccaatcgtagagagcctgagggcatttgtttggttgctaatacacctttttttggagtgaacgaagtaccatgatcttgtcagaagatgagttcaaaatagagcatggctatgtaattagctgtgtggtttcaaaggattagttataacacagttataaaaattaaaggtagtggttaacaggatagttttgaggatcaaataaataatgaaacaagcttttcatgaactcttaaggcctatgtaaatttcagttgcaaactgttaacgcttatgtttttttccttttggggcccttattcatactagtgacttcagtggcttttattcacaatagtgatcagttgctaaacttgcttctgattttggggtgcaggatatgagcttaagaaacgttacatgacctgagattaggaggtctgggtattataataaagtatcagtgcctgacgtttctctgcctggtttccttatttgcaaataaaggtagcaagcactccatttggtacttctaaagatctaatgaaattgtgtgtgttgacactgctttcatggttgcaagagaaaaagacagtgaaatcaaagcatctatcataaatgcctgacacatagaagatactttatgacagctatttgttattcttgtatataaaactagctttaggctgggcacggtggctcatgtttccaatcctacattttgggaagccaaggtgggcagatcgcttgcatccaggtgtttgagaccagcctgggcaacatggtgaaacccttctctatgaaaaatacaaaaattagccaggcatggtggtgcacatgtatagtcccagatacttgggaggctgaggtgggaggatcatttgaaggttgaggctgcagtgagcagtgatcatgccactgcactccagcctgggtgacagagcaagatcctgtctcaaaaaataaatctagccttttcattatatttctcttactacacttctatctcttattttgaagttttgttttagttcctgagtattgactctccagattcccaaataccaatgtcctgtaccagattcttggtacatggaccagatacttgaacacttaaagcactgttggtgttgtactttgagagacacagtgtaagagctgtcatttgtttgccagctggttatttagctagagtggcaataccttgccttgataaagttaccgcttttcaggttgtagcttctgcaaatcattaggggtcttggaattgatttatctttcagaaatagattcacaaactcattcataaccagaatatccatttgtaatgggaaatagaagttttggatgacagtttcttcctagttcttcctaagaaaatcttttcaaatgataatcattaatttcttcccacacatggattttgagtgatgcaggttaattgtatcatctaatccagtctgatttacccatatccattgtagcaatgtgtttaacacatgagctagacttacttctttccatgactgctggagaaacataaaccatgtcttatttcatgattacccttttttttctagcttctaaactgattgttttctgactgttttgcttcagaccatgtgcattgtatgtgggtgtgcatgagtgtataatatgttcacatgatttggattaaattttctttttataatcagaattctgttatgtttccctgatgctgtgcatttcttgtttactggttagagtgagtagtttgtatagaaagctgatttcatttcattgtgtatggacatttctttttcatccacggagggtctgatttttgtggggattgagggaagtccctgcccaaggcaccatggtgtattgatatgaatatgggcttttggagttagactgtttaaatctggctctactacttgtaacttgtgtgatttgtgaagaaatgcttaacctgtcagcctctgttttcgcatctatgaaatggaaataatataacaagtccgtatgatagatggtaaggatttcatgagatgattttatatgtaaatggagataaccatagagaagaatatatggttaatgtagtccattatcatttctgtatattactactggtttgtttgtgttttttttttttttttttttcatgtgttcgggctgagctctgaattttcgtctgcctttctgggtttgttaacttatagtctatttctcattgttctatttctccaccctcaagttaagtatggtactcttattaagagtgggcatccatgcatagcgttaactgtcattgtgcatatactgaattgattgcaaaaagaatagtccatgttagaccaaggccactttttaattatacttaaagatcttgttgtcagcaattataactggttcattttatagaaatacttaaaagattgggatattcctaggtttcagaaatattttcagttttactttttatgatccgagaattcgtaacacagcttttattcttcactatagaatgaatactccacagatttgtggattatagcctgggaatcagaaatatcactgattcagagattaccttttattttgatttatttaggaaggcgacatgccaattcatgaacttctcagcctttatggttatggtagtactgttcgactacctgaagaagatgaggaagaggaagaagaggaagaagaaggtgaagatgatgaagatgctgataatgatgacaacagtggctgtagtggggaaaataaagtaagtctatatacatatatttaagattgtagtctttattcttgttgaagttaaaattgcttaatatattttgattacttgtctttataatcttttcctgattttaaaagtgttaaaaattaagatattacagaaatacataatataaaaattggaaatcccctgtaatttactcctgaggtaacagtttggtcttgtcatttcaggtttctttttttccagtgcttattctaattaatttataccaactttctaaaaaaatgctattgcttttaaataataaaggctaattggcagtttgtgtttatttttcttactttattttgaaataattttagatttataaaaggtttaaagttagtatagaacgttcctgtatactcttacctcaacttctgctaaggttaacatcttggtacagtgctattaactaaactgcagattgaattataccagtttttctgctaatgtactttttcctgttgcaggaaccaacccagaggatgatactacatctagtatattcattttagtcttctgcatatattagaacaaaatttatatgctatggtctttcatctgcaactgttttccttacatcttagagaaatttaatttattattccacaggaggagaatataaaggattcatcaggtcaggaggatgaaactcagtcttccaatgatgatccatcacaatctgttgcttctcaagatgcccaggaaataatccgcccacgtcgatgtaaatattttgatacaagtaagtgttactggttgataatatttgaatataatttttactattttaggtattacctaaaatcctcttttttaaactggtctttgaattcatttagtctgaaattcttttcaacagtaaatggattttgttgtaagttattagtttagcaatgcagggtccctgttgttagtgaatatactatggtaattgtgtcatgtactacttgactttgggtgtatttgttttttctttgccctgtttttaaatgtttgtttcatggtcatctttttgtttctcatagtctttcccttagtttccattttttactttctttgcctcttagccttttttaggtatattcataaatacacctaaatttctctactttaaaaggaagaaaaacacttgaagaaaaataaactgtcatgaaatatgtagtaagataatattatctttattctaaatcagttttttcccctaagtttttataggaaatcatttcatgagaatacaattatgtagaaagtttatggtttttttggttttgtttttttaagtgatagggtgttaattatttggttagaaatatcttggcttaattcattagatatctttgagcatatccaaatatttgatggtagatgtaaaaataatatgtagatttagacaggataagcagtcattttatagtattggtgtcttatttattctagatagtgaagtagaagaagaatctgaagaagatgaagattatattccatcagaagactggaaaaaggtagttagaacaatattttcccaaaatttagataaattaatatttttttaaaaagcctcgtgtaattatttttttttttactaactatgtatattgataaaatcgatgtaagcccttttatgacatttaaatgtttggtaaatgttcagattccttcttaacacatctaggttagattagaaatctacatttctggcggggtgtggtggctcacgcctgttatcccagcacttgggaggctgaggcaggcggatcgcttgagcccaggagttcgagaccagcctgggcagcgttgcgggaccctgtctcattttataaaacaaaacaaaaaataaataaaacagaaatccacatttctgatttagtcctgaactagtgccaaattaggcatttgttgccctgtaaaaagtatcacgtatatgtttttcaatattatggaaagcatttgtggaggctttgatatttgttaagtaaattttgtttagtagttcatattgcaagtttttcattctgtattactttataaaagaaaaactctccaaatgattgaatttaatgttgacatttacaactgataagcttattatatgaagaaacagatttggcttcttcgtaactatatacaattaatttctgaaatgaatctaaagataatatattgagattagtttttaattataaaattatatagcatataattaatcatacagttaagttaaagaattgtaagttattgtaaaagaactgagctcttaggaaaaatctatctaaacattatgtagaattagctggttgcagtgatgtttcccctgttgtcccagctacttgggaggctgaggtagggagaatcacttcagcccaggagtttgagaccaggctgggcaacatagtgagaccccatgtcttcaaaaaaattttttatgtagaactggttaaaacaaagaaataatgttatttttgttgagagacaaggttagcccagtttacggtatgtgttaatttgagcaaatgatgggactcgacagaaaacaagaatcacaaaagttaatttgtgtggcctatttgggcaagggttctttcatcctgtttttaatctgattcctacagtgtgcagaaattaagatgaaaaaagctagaaaccttgggagtccttataaattgctgtcccacttcatattcaagtttatgtatcttcaacatgtgttgttttttaatctggagtgttcagtagagtatttgattaagcattcagtgttttttttttaaatgaaagaacaaaagctcagaggtagaacacctctcattgctggagggtattaattacccacaccttactcagaaagggtattaattaaccacacctttctcagaaaaaaattatgtaataaagcaggccagagtaaatgcagattgttttctttcagtatgattttgttgttttaaataattgtcaaggttcagagattcatttttttttaagacttataagatgaaattgagtttttatagaaacttaaggtaggggaaacagttttgaagtcaaacctgaattttagttgtagctctagaacttagtaattgtgtgctcctgagaaaatcaaatttttgagcttcatcttcttacatatagtatgggaataacaatgtcagccttatggggcttgctgaaagattaaaggaaaattgcatatatgatatgttaacacataatgatcttcaaagctatttcccttcccttccctgtactaccgaacaaattaacagatgaaaagaaatgttcagaactgaacaggaaaaaggaagtacctatctttaaactaatccagatgttctcaaccctgtttttatgttagaatcatttggataacttagatgtactgactaccagggccttcattcatagattctaatttaattgtcctgcagtggatccaggcattgatggtttagaagcaccccagccagggttagtaacttgacaatgttctttggtaggcctaggtgagttaagttaaaagaggcacaagatgtgacaataaaggactctttttatagtagaagacataaagagaattccattgtaagggtagagaaaatttgttgtaagtttgattctttttagaaaactgatcatgagaaagattggtttttcttatgggtatagaaataactttattacataaagcacgtctttgaagttgtactggataaaatgagctcctcacatcagtgaggtaacaatagcaggagagagactttccaaatcctaagagttaccaaaacttctagaccatgattttgtacctttcatgcccaattttgaaaatgtcagtaaatgtgttcttaacatttagccatcacacaaaagagggttcatgtaatcttggtctccttgcattgtgaaatttcaccagtggtagtttgcagttgcttttgagaacatccagtttcacctaatctgtgatttgactgtatagatatgattactggatttcctatttaattatatttgtgggaggaggttactttttcattttgtattgttttaatgaaagtcaagccataacctgcttatctatttcatttagagtttctttcatttggcccctactgagctttatacaaaccctttttgttatttttcctactttgaagctctgtttttcagacttcagtctatgtcagaatcacctagagagcttgttaaaataccaatgactgagtcctgtccccagagtttcagtaggtttggggtgggacctgagcatttgcatttctaacagtttcccattagctgtgtgtggtggcatgtgcctgtagtcccagctactcagagactgaggtgagagaattgcttgagcctgggaggtcgaggctgcagtgagccatgatcactccagcctaggtgacagagcaagaccctgtctcaaaaaaacaaaaatttcatagatgacactgatgctgctcatatagggatcatatttaagaccactgtcttaagtgtagatactctgaaaatatctgaatttgactttgtgttttacatgttttgcagttgtcttactaatggaattatcagaattcacttctttgtctctatattttgaaataaagtttgtatttattgtttacgttgcatttcacctcagtattattactaatattttcatccagtcattatttgtcattcatcttcacaaaggtacctctgaggtagttaattggttgtttttgtattttatgacagagaaaccaggaacagtttactaagatggtaaggctagaaaatggatataaaatctgttactagatcttactaatgttttatgttatttttaaaataggagattatggtgggctccatgtttcaagcagaaattccagttggcatttgtagatacaaagaaaatgaaaaaggtgggttattagtaaagttacgtagctgaatttatgctttcagtgtaatgaactgttactttatatgtaaaatgtgataagaacatgacagcctactaagtaaccccattgtaaccccattggtttgtgaaagaggacccttcattatttctgtgagaagaatgtgtgtactcaattttttcagtttggtctatagaagcctagccaaaaaaggaaaaagtgaatgctttttttcattttaaagtgacttacaatgtctcaacagttttttttacttttttccccgtattttcagtgctctaaactttaacccttctctaatctttataatttagtttttagaagtccattttatatcaatgaaaggcataaaaacaaacgagagtaaataactgatataaacagcttatttgctcctgaaactttcactaagcaaaatggagtgcttattaaaatggagtactttggaccaggtgccgtggctcacgcctgtaatcccagcactttgggaggctgaggcaggcggatcatgaggtcaggagttcgagaccagcctgaccaacatggtgaaaccccgtctctactaaaaatacaaaaattagcctggcgtcgtggcgcgcacctgtaatcccagctactcaggaggctgagtcaggagaatcacttgaacccaggaggcagaggttgcagtgagccagtatcgcaccactgcactccagcctgggtgacagagcaagactccgtctgaggaaaaaaataaagaaaatggattactttgatgcttgtgttttaaaaataatttgggaaaacaacttttgtatacttaaattttacatgtttttttttttccatttcatttcatttgaaagtcctgaagtaagtcatacttccaataacatacaatacttgaagatttttttttttttttgagacagagtcttgctcttgttgcccagactggagtgcaatggcatgatctcggctcactgcaacctccacctcctgggttcaagtgattctcctgcctcagcctcctgagtagctgggattacaggtgcccaccaccacgcccagctaatttttttgtgttttttagtagagatagggtttcgccatgttggccaggctggtcttaaactcctcacctcgtgatccgcctgcctcggccgcccatagtgctgggattacaggtgtgagccaccatgcctggctgaagattttttttaaagagtctgtttcagattattcacctcatttgagttccagaaaaaatgctgtgtatgtttcctttttttttttttttttttttgagatagagttttgctcttgttgcccaggctggagtgcaatggctcaatctcggctcactgcaactttcgcctctcaggttcaagcagttctcctgcctcagcctcccaagtagctaggattacaggcatgcgccaccacgcccagctaattttgtatttttagtagagatgaggtttctccatgtcggtcaggctggtcttgaactcctgacctcaggtgattcgcctgcctcagcctcctaaagtgctgggattataggcatgagccactgcacctggccgtatgtgtgcttttaatgagttcatgtgcagtgtgacatcactcaggactagaaatctttatttcttttatttcagttttcttcacatttcaacttaatatacacaaaggcctttggagttgtattaatagaagttttttgttgtttatttctttttagcattctctccaaaaacttactttatattctaagtatgcacctactctcagggcaagcagcaggtcagaggcagtcaagggaacatcacaggccagtacggtttttgtgatagcaatatgttttaatacatcatttaaatgtttaatagctaccacttatttctcaaggtaattcctgcaagatataggaacattgaagctagcagtatggagtgactttattacatatagaaattctgtacatatggtatgttctgtgaacgtataattgtgtgccaaaataaatgatctgttggcttttgtatttatttttgtaattgaaatgtcagttttgtgctttactcgtatagtagttagcaatgttcaccattgaggtttttctttctgcaaataaatgaactgaaagacatttgtttttattaaatttcttttaaattttgacaatgaaagataatagagcctattttatattttagtatttatattataaatttatattatagttgaaaatagttttattgcagtatactttgttttttattttaatatgttcgtattatatatcaacagtgaataatgatcacattctcttatttatgcttagttttaatttttaatttttgtgggtacatagtaggtgtatatagttccggggtacgtgagatgtcttgatacaggcatgcagtgtgtaacaaccacatcatggcaaatggtgtatgcatcctctcaagcatattatcttttgtgttacaaacaatccatttatactcttatagttctttaaaaatgtacaattaagttattgattatggtcaccctgttgtgctgtcaactattaggggttactcattctatttttttgtacccattaaccatccctacctctctcttactcctttcccggactgaccttcccagcctctagtagccatccttctgctgtatctccatgggttcaattgttttgattttagatcccacacataattgagaacatgggatacttgtcttttccgtgcctgactttttgcttaacataatgaccttcagttccatccatgttattgcaaatgactggatctcattctttttttatggctgaatagcactctattgtgtataagtaccacatttttttttttatactttaagttctagggtacatgtgcacaacatgcaggtttcttacatatgtgtacatgtgccatgttggtgtgctgcacccattaacttgtcatgtacattaggtatatctcctaatcctatcccttgcccttctccccaccccacgacaggccccggtgtgtgatgttccctttcctgtgtccaagtgttctcattgttcacttcccacctatgagtgagaacatgcagtgtttggttttttgtccttgcgatagtttgctgagaatgatggtttccagcttcatccatatccctacaaaggacataaactcctcctttttgatggctgcatagtattccatggtgtatatgtgccacattttcttaatccagtctatcactgatggacatttgggttggttccaagtctttgctattgtgagtagtgccacaataaacatacgtgtgcatgtgtctttatagcagcgtgatttataatcctttgggtatatgcccaataatgggatggctgggtcaaatggtatttctagttctaggtccttgaggaatcgccacactgtcttccacaatggttgaactagttcacagtcccaccaacagtgtaaaagtgttcctatttctccacatcctctccagcacctgttgtttcctgactttttaatgattgccattctaacggttgtgagatggtatctcattgtggttttgatgcattcatctgttgatggacactttttttgccatctgtatgtattcttttgagaaatgtctcttcagatcttttgcccatttttaaatcagattattagacttttttcaatagagttgtttgagctccttatatattctagttattagtgccttctaagatgggtagtttgcaaatattttctcccattctgtaggttgtctctttgttgattgtttcctttgctgtgcaaaagcttgttaacttaatatgatcctatttgtctatttttgctttggttgcctgtgcttgtggggtattattcaggaagtctttgccctcagtccagtgtcctgcagaatttccccaatattttattgtagtagtttcatagtttgaggtcttagatgtaagtctttaatctattttggtttttgtgtgtgacaagatataggggtctagttccattcttctgcatatggatatccagtttcccagcaccatttattgaagagactatcttttcccagtgtacattcttggcatctttgtcaaaaatgagttcactgtaggtatgtgacttgtttctgggtcctgtgttctgttctgtatgtcttatttttatgccagtacatgctgttttagttactgtagctctgtagtataatttgaagttaggtaatgtgattcctccagttttgttctttctgcttaggatagctttggctattctgagtcttttgtggttccatataaattttaggaactttttttctatttctgtgaagaatgtcattggtaatttgataaggatttcattgaatctgtagattgcttttggtagcatggacattttaacaacactgattctttgaatccatgaatgtggaatatcattccattttttttttttttggtgtcctctttaatttcttttgtcaatattttatagttgtcattatggagatctttcacttcttcggttaatttctaggtatttgattttatttgtggctatcttaaatgggattagtcttttgatttccttttcagaatgttgacttggtggcatatagaaatgctactgatttttgtatgttgattttgtatcctgcaactttactgaatttgtcagttctaatagttttttgtggcgtctttaggtttttccaaatacaagatcatatcatcagtaaacagggataatttgacttcttcctttctaatttggattgcctttatatctttctcttgtctaattgttctgattttttcatggtttaaattctaacttaatattttccattttaacatgattttagaaagtaattatgcatatgtaatttttttcagggacgagtgatttatgaagctttctcattttgagaatttaagtatattagtttgtgtaaggaggatcagactaaacttagcagaatgagattgctttggagggatcgctgtggtaaaggggcattcctcagctttgtagttctagaaattcagacttttgtcaggatacccagaatttgtctcctcttaagataccctataccataaaccaaattcttgaaactattaggtaaactatgctgttagaaataaaacttgtcaaagggacagtgctgattagtgcattcttatggaaaacatttcacaggatatttttcatcagttttgtgaacacagacttttttttttaagtgccacaaaactaagatatcctgatatctttattgtagggattacttaatggatggatcagaattctccttttcattgatacgtggaaacctccttacctagtatcttggagagacattgacaaattttttctctctgccatccgactttttttattaggcaccatgcagattatatattcttcattggttagcactcctaattcaaacagttaaataaacatgatttgttagttataataacattccaggcatgctcctttggacttgtatctgttttgattacaaaatctcctgagctacccttaactttttcctaaattcatgtaagttatcatttatactaaccacagtgtattttaaccttttgtttactcatctttgtagcattactggtaagtaggtcgatccttgccccataggcacttagtaaacatttggtgcctaagtgaataggtgggtgaattatttccgaattagggtttccttatatggccttgtctaccccaaagatcccaaaaatataagaactttcgtctgcagagaacagaggctgagcagagaatagaaatcaatagcagtatatccagattcattttatcatggtagttttattgtatttataatttaggatataactaggattgtaccagcagattagaaaaggaatgatgtttattaaggaagattttctaaatattttcctttgggctgtactttaaacaaaagtatctattttgggaaacaagggaagatagaagaaggttttgaagtgtgtgtgggtgaggggacaagataattcatgtgaaaataatacggccgggcgcggtggctcacacctgtaatcccagcactttgggaggccgaggcgggtggatcatgaggtcaggagatcgagaaccatcctggctaacacggtgaaactctgtctactaaaaaatacaaaaacctagccaggtatggtggcacatgcctgtagtcccagctactctggaggctgaggcaggagaattgcttgaacctgggaggcggaggttgcagtgagccaagatcgcgccactgcactccagcctgggcaacagagcaagacttcgtctccaaaaaaaaaaaaaaaaaaaaaaaaaaaaaatcattgcctggtacataggatatgcttaattagctgttaatttcttttcataataaaagaaattttgacgctgttagttattctttgtctcttaaaatgtttctcaggctggctccttcctgttgtcatttacatatttgcctcatctttgaaaacaaacaaaccaaaacaacataaaaactttcttcacctctactctctagctactcccctatctccaccatcataactaaacttttcaagagtcttatttcttcactttccatttattcttcagtcttatccaatgtggcttctgcttccatctctctacagaaagttctcacaacattcacctccttgttagtaaagctggcataacctttttcaattttcatcctcatcactcaacagaatttaaccagtctttgaagctattctttgaaacactctcttcccttagcatctgtgatgttacattcttggtatttcttctgtttgtgacttttgaattttatccatgttttcttcttatcatttggaattccacaggctttgtcttaggtcatcctcctttcattactttttgagttttaattagatttaggctttcatcttcttataatggaaattatgatgaaacttaaatacctttaaaaaagtaatgacttgtttttgtgaaagtgatttatatacattatacaactcaagcatcacagaaaacataaagtaaaatttacttcaaatcccaccaccaggaattaagcagtgttaacatttggtgagcattcttctagacatattttcaaaaataatagttacagttacaattacaggattttagtatgtgccagaatgattgtaaagtgctttaaatccttaaaactatgtggtagagttattgttacctcctttcacagatgagacagaagggaaataatttgcccaaggtcatcatacatgtaataagtggtagagatggtattcaaccaagagagcttggaatttggtaaactcaagataaagtcagactggatctgcagggggcataaagtggtacctcctctctgtttaaattgtttaatttacttaaactatagtttttgcccaagaacgaagtcaggcaagtagtagaaccacactgtacctcagttctcaacatttggctctgagttgtttatttagtaatatgttttaacacaaactctatcagtttttagaaatttgtttaacattgtcttttactaatttagtatatgaaaatgatgatcagctcctgtgggaccctgagtacttaccagaagataaagtgattatatttcttaaagatgcatctagaagaacaggtgatgagaagggtgtagaagcaattcctgaaggatctcacataaaagacaatgaacaggtctgtgaaagaaacaactgttagaactttgccatacacatttatacatgtaaatgctgtcacttgcattgttgttattctgtccaccaaactttttataacattattgacagggaatctgaggttataatccctgtaagatatccgttgttaccacagtgacttcattggtgtgaagctcaaaaacgaaacaaaaacctgttttattttgcctgtatatacttttcattaggctttttaaaattcctttggctatccctaagaatctgtgtatatcaagttggaattctcacctcggattatcttatgtacatggtaagaccagtgcctaccatgaacctatcttttttacctttttaatcattgtttttttctgatttgtttaaaattataggaatctcaagaagccacaaagaagggattttcattgatataaaatgaattctttttagtcctagggatactatggccaccaagtttatgcatatcctactttgtacatatttaaaggtagttgatttatcaggatcgaattcatatttgtttttctttggagttctctatatataacattcactaaagttatttgccctcaaaaaggatgaaaacactggatgtttgaaaaacttttaagaaattgtagcattgaactgtttatagtccttgtcacatattcaagccttttatttttctaggctttatatgaattggttaaatgcaattttgatacagaagaagcattgagaagattaagatttaatgtaaaagcagctagaggtaagtatagtttttattcattttcatgatttggcagaaattttaaaattaagcttttcagtttacctaggtatagcctaaacttaataatactgatttttctgagtttgataaatatttacaaaataccaagtattactaaacaaatcgttacggggagtgggattaagattgtcccttcctcctttgtgggaaaatacagtcatgtaagtaaaaatgtaaaaatttatactgccttatgcattcaaggcatatttataaatattttcttatttgatcttgataattgccctatgaactaggtagtatgacagataatacctttacttaaaggtaaaaattgatgagcctgagatctctgaactaaagtaacttggcgaaagcaaacataattcatcagtaatgaagccatgactaaaatttggatttttcttttttatactatatctggctcctaccccccttcactaagagtactacatatatatatatacactacatatatatatatatatatatatatatagatatgtaacaaatgagagatatttatttaacaaaaatttgagtgccttctgaattctgaggatgtaactataaacaaagtcccttcccctcgtggtgcttagagcttaggtagggaaactggaaaatagctgatgaattcttcaaggaaaattagagggtgctattgaaacctgtagtaatgggacttaacctatttgcagagagggtagtgcttttagggaaagcattcagaatgaagtaatatttttgttgggatgcaaaagaattatctcagtgaaaggggatgaggcaggaaataattctaagcaaaggagagacaccatgcacaaagtctgaagtaagaaagaacatggcaaatttaaggaattgaaaggtggctgagatagtttgatcagtaagaattaagaagaaagtggcacaagttgaagctggagaggtagggaccaaatcattcaaaatcttattaaataaggaattgttgtcactttatcttttgcaacaattagtaatagagctcaggagtaaaatgcttccctcatttttacgagaaggttaagttttcatttgtaattttgttatatgcaataattgggggaatattgcttaacagtttgttcctcccatcttgtcagaggaattatctgtttggacagaggaagagtgtagaaattttgaacaagggctgaaggcctatggaaaggattttcatttgattcaggctaataaagtaagtaatgataatctcttttttgcaaaaagaaatttagttgaacaactcaaatggtcatgtatcgtaatttgttatattgtctagtgttaaaggtttcataattaatatgacaatattttggtatttagtgagtaattatagtaaggctgcctatacttcctaacctataattacctgttggtgactgttttcagtgcatcatattgcaggtgtttaagaattgtactcatttacaagcatgttaatcaacttctagttggggtgtgtatgtgcaatgcaattctttatagctgttttccacagtctgtgactgttttatggagggcctttgaaatgatttggaaactttaaagcactttcaatatgacattatttgcagttaaaatatttattacatttgcttaagtcctgagtggtctaaaatcaaatacttaatatttaacttagttttagtcaacatttaattttctaggagcttctgtgtcgataaatcagctttatattcttatagttataatttgaggattttatttaacataatcatttatcatttcatgttgataatatcagtcatgtaatttatactccaaatagctttataattacttacagatttgttttggggcttaattcttataactgaaattaggtatgatttttaatagtaaccatataattatatagaatagaaaaatgtgttgtttccatgagcaacacattaggacaacagattaggacaggcagaattaaagtcttggagattaaatgtaggaaattaattcccaggcttatgattatcacattatttttagttagtagaaatgacaagggtattggtttatgtaattccttaaagatagcttctaagttttgtgtcgtagcttgtccaggaccttgttgaaagtacctgggcttatgtctgaggctctgaatagtcttctgccacagctctctttttatacatttggatgtgattggattgtatccagttgatttttttgacacatatttaatattttttgttattaataaaatatttacaaatcctgtgggttcatttcttaaattttgtcgtgcattaactagtttattcttatttttattattttttttttaagtgggaactgggcagtgaagagccccactcccaattagttcattcttaattattttgttgaatgttggcagtttaccgcagataacactaatagagaaatgtttagttttagcatttaggataacttagaagacaatgtaattagtttcaaaaatgtatacccctaatgttgtgttcatatcatctgataacctcaaatatagttaacattcaagaaaaggagtgcattatgtgactggccgtgtatgtttttgattaaaaaagaaaaaagttcgttgtttcatggttgaaagggacaacatttttggatgaggttttttttttgttgttgttgttgttgttttttaacacttctgcttgaattaaaacactcttaaccaaaccatgctgaattacctaaggaagggacccctggaatgatagcttatgtaacaagcagcagcaacaaccctgaccaatatgatttttttaaaggagttaagaaattataggtgacttgaaacttagagccaagtaacataagtattaaaagtataaccttgatttctcataaatatttgggacagtggcatttaaatgttacaaggtagaagtcagctgacctctacataatacactaaattactctagtgcacaaaaagaggacagtaattctttaaaagggagacgagtactctagtgagaatatcgagtttgtttttatgtctggaattaaagttcagatcttaatcataagttctattttgagggcttttgttgaagatttttcataatcttaactttgcatgccccaaaatgactttatctttttgctttcagtaaagtacagttgacttagttcgaatctatctagaaataagatcctagaggagacaaaaaacagcttgagaggatgattttttttaaagtcctgattgctgtcagtctcagagcaatatggatcagagctgtacagtgcaaacgggaagaaagcaaaatatatgttgggtaagggagggtatcatcaacatttgtcctttaggtgcaatcagtgctacagaatatttacttcaagagcagaaatttatgggataaagaagtatattgcatccagaacacatacagacactggatttccttttaaatggtcagtattgccggtgcagtggctcatgcctgttatctcagtactttgggaggttgaagcatgcagattgcttgagcctgggagttcaagaacagcctaggcaacatggcaaaaccccatctctacaaaaaatagaaaaattacctgagtttggtggcatgcaattgtggtcccagttattgagggtgctgaggcaggaggattgcttgagcctgggagggcaaggctgcagttagcggtttggtgccactgtactccagcctgggcaacagagcatgacactatctcaaaaaaaaaagaaaaagaaaggaaaaaagttatcagtattttatttatatacatcagccctaaatcctcagtattttatatatatacatcaaccctaccaccagttctcccggctaagtaacaaaaaggaattctgtcagcatcatttaattccgtaggcatttaacattatgtgaggggagccattcagttgcacaaataggtacagcacagtaagccgcaagagtaacttagtaaacaaagcattagcattattatgatacttttaactcactgtggcatcttcccagactttctagagagtaaattaactgagtctgggttgctgttgggactagtaagagaatctttcaaaagggaatttaaagatacgctccctaggtacccgtactctgtgagtaaaagtattagcaaactgtttataacatttattttaacatgaatgccacttccaggccttttttttgtgtgtgtgtgtgtgagactgagtctcattctgtcacccaggtgggagtgcagtggtgtgatctcagcttaatgcagcctctgcccccacccccaccccctgctggggttcaagtgattctcctgcctcagcctcccgagtagctgggattacaggcacctgccaccatgcccggctaatttttgtatttttagtagagatggggtttcaccatcttggccaggctggtcttgaactcctgacctcgtgatccaccccccttggcctcccaaagtgctgggattacaggcgtgagccaccgtgcccggccaacttccaagcatttttaatacaggaatatatttttctagtaaattaggatgatggtagcattttaaaaagcacagtgctgtatatctgaagacctgttgccaatatattatttctcttaatagatgtttagaaagaatagctttcaacatagctgctacactgttgtatgttatatataggattatatttcagttaaggactagccaaatttattttcaaacttcagatgtttatcatgaagtaactttgttaaaaaggagattcttaaaagcaagcatttgtttcttacaggtccgaacaaggtcagttggtgaatgtgtagcattctattacatgtggaaaaaatctgaacgttatgatttctttgctcagcaaacacgatttggaaagaagaaatataatcttcatcctggtgtaacgtgagttaattttttccttaagagctatatatacatttttgctaagcttttctagatttttcttgagttaattattattttgataatcttgcttttatatacttgatcttaaccagaaggccgagagtgataaaatcttgcttttataatacacattaaactttaccatctattatatcttcataaataaggcatttagacttttcagtgtcttatgaaatattgtaaactacagttcatattatgtatgagacaagcatatcattaaagcaagatttagaatgtatatttttaatacactgttgagaagaaatggatcagaacagctgtgaaagcatgtttttcttaaattcagttccattcagtataagcacatacagttttaatcttctttttttttttttgagatgtagtctcaaatctgttgcccaggctggaatgcagtggtgcaatctcagctccctgcagcctccgtctcccggcttcaagcgattgtcctgcctcagcctcccgagtagctgggattacaggtgcctgccatgacgcctggctaatttttgaatttttattagagacggggtttcactgtgttgaccaggctggtcttgaactcctgacctcaaatgatccacctgcctcagcctcctaaagtgctgggattacaggagtgagccactgtacccagcatacagtttttttatagaggaaaaaaaacatgtatatggtgactttccttttcctagctttcctgaatctttcctctaacaagtaatatttaagaattagtaatgtaactctagtgtagtcccattgacacagatatgggttgttgtatccattctttatgtaaaatgtctgatatgcctaatttattcccatgttaagagaatttattgtctacacctcattcagtctagctttggagtgaaacattccactaccactggcaatttgttacttaaacagaaaagagtattgaaccccttgtctttcatgaattgctttaaaatggtgattaattgttatgatggaattaactttacagtgctatccttaattattccctaatgtttacagaataaaaaaataatgcaaaataaaaaataaaaataaaaaaaaattgactttgtcaatgtactccagtaaagatgttcttaaagctgaccaaataattaccttcgaaagatgtgcttgggccaggtgcggtggctcactcctgtaatcccagcactttgggaggctgaggcgggtggatcacaaggtcaggagtttgagaccagcctgacaaacatggtgaaaccccatatctactaaaaatacaaaaattagctgatgtggtggtgcacgcctatagtctcagctactcgggagactgaggcagaagaattgcttgaacccaggaggcggaggttgcagtgagccgagatcaaaccactgcactccagcctgggcaacagagcgaaactccatctccaaaaaaaaaaaaaaaagatgtgcttgtatgtttatttgatcttgctcttcagactcctaaactgcactgtttcttgatcaagttcatttataggtaggtatctctgctggtcacttccttagaaggtcaaatgctctaaagcccacagtaaaacaatctgaaagagaataaatgggtatgattcacccttggaaatcatgggacaatggagtgtgtacatcatcccccattattcaaagctggtgattgctaaagtggaatttcataaatagcagtattgcaaattttatctaattgcttaatgttaaatttatagttaattttttttccattggtagtattcaagcataataatatagaattagatacagcatctagtctgcagatatatcttaaaatagtcatgattttcaaggtattatatagggaaaagcaatagtaacatcttttatttttttcaaccatttcagaaataatgttcacacgtgagctacattcagtctgtaatcatcagcagtaacaacataagaatggccatgctgggtcagacccatggttcatccagttttctctttcagaaagcatcaccaaagtgtgggctggcttagttggtcctctgtgatgtcaagatcaacaggttaggtagggatgtgccaccaaatgttctaatttctctattgatctccccatagcttctgaaaactttttgaagatacttttatctgtaactttaatgactcttaaggttaaatattctttaggtagagtggccacagttaaaaataaacaatatcttaatagtggtcacctggtataatggtatgacgtgaactaatgtgttttttcccttaggcaggaataccatggttttgtaggcttcagttgtagccccactgggttgttttttttttataaagtttatttaactgaaagaatcatacttttttactgagactcttcccttttagctgtgttatgtcttctgtaagaagcagtgaccaaactacatttctttccagatggggataaatttttctggtttgcttccattaccatctctttctgttaatagctgcactttaagtgacttcataaaacattaagctaatgtgtttagagagaaatttgagtgaattttctcatccttctttttaggtcaaaatccataattcagagcacattatcctgaaagtcatttgttcaccaggatgaaacacattttccccttttctgcctacaaacagcctttgaaagattctgctacacattgtccctatttactacctggaagaattgggaaccttattggagatttcattgtagaatactcagctttccaaataatttttccaaaaactaaacattaactcagcataactttgattacctgaatgctgcttcaactttctggatggtttgtctgattctgccctttcctgaatattctggatgctattaatctttaggaaacaatgataataataattactatcctttcacagaattatgactatatccagaaattaaaaataattttgatatcaactcttgtttcctttgccttggctttttttttttttttaaagacggagtctcaacctgttgcccaggctgctggagtacagtggcgcaatctcggctcactgcaacctccaccgcccgggttgaagtgattctactgccgccgcctcccgagtagctgggattacaggcatgcgccaccacacccggctaattttgtatttttagtagagacagggtttctccatgttggtcaggctggtctcaaactcccaacctcaggtgatccacctgcctcggcctcccaaagtgctgggatgacaggcgtgagccaccacacccggccttgctttggcttttaacttccttcatattatccattcccactataacgtatttatttccaacaattcctcatcatgtgtcttctgttagccttagcacctgaagtccctttgggactcaccacacttatttctgtgtgcttcaaatttgttatgtaatttttctataattatgatgagtagcataaagctgaagaagtcttcaagaccatctaatttaattctatatagatttataggtattcaagaccatctaattgaattcccttcatttatagatgaggaaaataaggcatagaatgtaaattgcataggtcatggtcatatacatttctgagatatgtattagttttatacctcagactattagaagtttcttgaagtcaggtatcacatccctatatttgttaaatccctataacctaggagacagtgatgaccatataggttgagataactacaattaatagcatattatagactattaacacagactttcagaaaattcctcagagcttccactgtttccttcttatttaccctgctcacaaaattctaagagatttgtcttaatatttctatcatacttatgctgaaggaattttaagataaataacacaattagaattttattgagtttctttctgttctgtgccttgcacaacttaggtaccagtggtgcaggtataaacaaagtagactaaaaattcctgaccttggggaattctagtgcagtatctagtatcagcaaactttttctgtaacaggtagagaataaatattttatgctctgtagtaagaaaggacttaatcacactactcagttgtgcagttgttgcaggaaagcagtcatagacactatgtaaacaaaggtgtgtggctgggttccaataatactttatttacaaaaaacagatggccagcccacaggctatagttggctgacttttattctagtggtttagtagcactttttggattatgaaacatttttatgtacatatataatacaataaccatgtgtgttagacatatgatttatctacattttgtaggtgatacactaaacctgagagagacaaatctctatcccagatctgctcaccaatgtcacttaaccacagttacgtagttcaggaatgatttagagaagaaatgagctcacatacaatgagaaagtgacaggataaaaccagcagataatcccaggaatttagttagcatcttatagctcagatctggcagaaatataataccaaaaatatccaggaaggttttaggaggtaatcagtcctttttgttaggctcaaatttgtcttttaggtatcgcctttaggagctttaaaattcaatctatgtttgtacagaaattcttttgtacttttactagacatcacccctatcacttcagttaagagatcttccagttctagttgggccactctgagcacctgcctacaactttacaagctttaaaatttcctatgggtctctaaaatttgttactttaaagccgttatgcatttttcctataaacatgtaaccaaaaggagcttttcatttaaatattcagatcctggtatgatagatgaagcactggaatgaatgttaagtgaatattaggatatatttgttaagaaagccttctgaatttaacctcaactaatttttaattttcagctctttttaatataaaaattgttttattaattttaagggattacatggatcgtcttctagacgaaagtgaaagtgctgcatctagtcgagcaccatcccctcccccaactgcatcaaacagtagtaacagccagtctgagaaagaagatggcactgtaagcactgctaatcaaaatggtaagcaaccagagaaacatttctctttcttcataataagggacactttcttgcagtgacttgggaaattccgtttgggtttctattaaacttccagagcagaaagtaaaaaatgataacacatgagacaaacataacatcagcatacatatatactaacagaatacaaagtgattggacatcactaaaaagtaattttaataaagcctactgtcaacagtgactatttcttgtaagaaatttgttctttttcagtagcatctcttttcctgtcttgtctagttgggttgatgcctagatacaagtatttatgttaactcttaggtcaaaaccctgcagtttcacatgagatatacagatcattgcaaaataccttgatgtaaggtaacaagtgcactgttttgaatatttaagttctctttgatagcataataaccttgaataatgagaaaagataaagccggtatcaacctgtatattaatattctacagaaatatttgtttttctctccaagaaaaagagaagaaaaaggcataccaattgtttgaggttcagatagtgtttccgtttaaaatatacagtggaccagagatcactgtgctgatcagtagtaagagccagagaattattttgatttcttctttgattaaatggtctttttaagtaaaagagttccaagaagaaagtaataagcgccacccccagctcctctgaggaaactggtgataggagagtaccagtgaagagctgacttcttcctgacagaaactggaagagaaacactgtgaaagccttgatcctcttctgacctttggtctcacattggtcctgctggagtgtatatgcttagttcatttcatgacccctctctgttccctcactacttctaggaataaaccaaacaaacaaaacttagggcccagtaactatgtcctggtccaagaaggtttattgacttgatgtctaatgtttgtcacgtccattctgaagtagaataagatgctgagactctgaccttgggactaaccgtataggctcaagggaggcagacagttggtactactattgtttttcctgtttgttcttaacatattaacaccaaatcattttcttttcctttttaagaaactatttgatgagaacatgctgttaggctaggaaagtgttcataagttacttataaattacttgtagctcaaaagccactcaacattacgtacagtcaaaactgccagctttttcaaaggaaggaaggaacttttcatcccaatgttatattacttttttatatggggctttaattagtactttgaaatcttacagttatttttgacctaatcacagtcgtcagctagctttttggacttgttcctacagaattgttctcttcaatatattatgatgcataatccccatgtgcattcatgatttgagtgcattgagttggtcaaaatagaatattttcttctatcagaatacagtatttgaggctcatcctttatgccgaatatttttcaagcaattaaattgtaattattcagtgatgcaccctatattttacttcttatcaccaaaatttgcattccattttacagtcaactctaaaatgaacttttgttttcttttattagaataattttgcttttacttttctcacctactatagaatttgtatttactttttaagtaatttgtatttacttaagtaaataatttagcactttcaagtatatgcttggatagtgcggcattagttttttaacattatgacagattatttaagtctacttaggtaaatagtgtgtgatcatcttttttttctttttgagacagagtctcgctttgtcgcccaggctggaatgcagtggcacaatctcggctcactgcaacctccgcctcctgggttcaagtgattctgctgcctcagccttccgagtagctgggagacggtgcacgccaccactcctggctaatttttgtatttttagtagagacaagttttcaccctattggccaggctggtcttgaactcctgacctcatgatacacccgccttggcctcccaaagtgctgggaatacaggcgtgagccactgcacccagccttgtgtgatcttttaaagtacagttcccatagatttacattaagaataaaaaagtcatgacatcttgcttttatatggcagtttactcaagctttttaaagaaagagcattcatcttgcttttacgtggttttagaatgttgaaaaccttttgttaaatctgagtaatttactgcattttccattaattcagcttagttagactgctggatccagtgcttgtttgctgtcacatatacctaatatgcttttaacatatgccaaattctgttcttagttctttacatttattaacttatttaattttcacaacaaccctgtgaggaatatctattatgatcttcattgtatatatgtaatgaaatggagatacagaaagagtaaataatttgcctaaggcgacatagcttataagtaatagagcaagaatttagactatgtatttgataccttgcttccttgataacaataactacaagctgttttataatagtttgcaaatttaacttttttctaattgtggtttcatttatatttctttcaacttaggagtgtcatctaatggaccaggtgaaatattaaacaaagaggaagtaaaagttgaagggttacacattaatggaccaacaggtggaaataagaaaccacttcatgcagatatggatactaatggttatgaaacagataaccttaccactgacccaaaacttgcccatatgactgcaagaaatgaaaatgattttgatgaaaaaagtgagagacctgccaaaaggcgaagggtaaacagcaatggaaaagaaagtccaggttcttctgaatttttccaagaagcagtctcacatgggaaatttgaagaacttgaaaacacagatgactaaattttagacctattttactttctttggagtaaattctggtgtgactaaaattttcagggttgatgggttaccttaaaaagttgatttccttgaagcagtttgaaaatttgaattgagtcttaactttaggaaatgaggtttcataattctgccttttgcagatttttttactttaaagctgtcagactcttttaagggtattttaaaaattagtaaatttgaatgaactaaagatatatctctaccttctcatttgaatatctttagttcattcagatttactaattttggtaaatctgaatgaactaaagatgtatctgtaccttctcatttgatgtattaatcataaaatttcactacaaggtaatttttgcttagtttgatggatgaatgggaaactcaagtccaaatttctgcttaataccaatttctctgagtttcttgaaatgtctttaaaacagacatttttctcaccaaacagtttgagtatctttattaaggaaacccttacgaatcctgaaaattatgctagcatgatttttttatatatagaagtttaaaaataaaccaggtcaggtttgtatatgtaaaattgttgacatcaatgatgtctttccatattcttatctgggcttaagaaatacattctgtatttttccagattctttgtagcctttgaaagatttttacagtacatatgtcttgactgagctgtcctttcttaatacaaaagcgtgtataattttcttaacttgtacagttggtaaacttttatgagaggaattgttattctgagtctgtcagctttcattttattttgctaaggtttttctaatgaatttttaagtgtttgtgtagtaattaagtcatatttcttatccaggtggttaaagcattcataaaggattataaaatttttttttttttttttttttttaaatttctacttaagggcaagtaatttgagaattctgaaattaagcatgatgcttagattgcagtttgttttgcatttgctataattttcaaaattatttttgaagcaagacaaaagtttaatgtcagcttaagtgcttaaatatatcatgctgaccagaatcctgttatttttatatgcatcataaaatttcccatttctgcattaaataaacagaggaggggggtcaagtgatacttagatattggcacacacaaggaacaactgttggcaggcagtatcgattttatgaagagaaagtgaagtttgaaaacttttcaaacttttctagttacaatccaatttttcagatttgataatgcttttccaaagtgaaaataagatacacaataatcattgctctgtgtgattacagataggattatccatctgcatagccttgtaaaagtgccattttatttttagtgctaaattcttgttaaataatgtagttttatatagctgatagaccaacctatatccaaacttttataaaatattaattattcttgtttttctcacacaggcatactccaaatgcttcttccagttcatttttcagccatcagttcaagagccaatgcctttttaaaataaagcttctgtggtcttgtttttaatggctcaactgtctgatgtaattgagtgaaggtttgcactgagaaattagcattcaggccttacccccatgaagtattactgttaacatatgttcggactgcttcccttcaccaatgtgaacaactttttttcccaaacagtgttaaaagccactttgcaacacttgacttcatcttaatgtacattcactgttgttacatacatatctaagtaaatcaaagttttgggtggaagtgttgagaagtatgagttttttgttgtttttgttttacttaaaacttttaatttatccagaatggcagtagctttagcaagcagatggtcacaatctgttttctaaatcattttttattaaatgaatccaaagtatcctagctctttgtcaaagatggtctgtagaaatgtttttaaagattagggatgctgtactttttgaattgttgcagtgttggagatgccattttcacctttttaaaaagatgcattttatttgcaggtttgtgaagttcttgcaaactcttactacagaaatgttttaaatacattctcaggcatgtttgcaaaaatatggcacatgtatacattttaggaaatgttacttttgttaatctttaaaaaatacacctaatgaaagacattccactattatgcgtaatgctcagctttttgtaaagaaatatttaattgtattttgtgtttatacaggtatttcacacaataatttgttcttaatgcagccactataacttgataagtcattgcactatttaaaaagttttagtaatatcatgaatttaatttgcttaagatttagtacatttcagaacttttgaacttttgacaaattgcattggaaaaagaagtctgttaatagtgatttagtctccccgcctcattcccacccccaacaaagcactatcattttcatttggaatgggtattttctgtttcatgatgtattttcaaatagagttcaggatctgcaattcagttcaacacaagtttgttgagctttaaaatgtatttgaagtaatatttaaataggcatttaaaatttcaaattagatgttaaatttatgcatagtaattttgcactgtaaaataattcccttctcccattccttgtctgccattctgaatatgcttattaaaatatttttttaaacatatttgcctacataatactgtgtgaatattttcattagattaattcactaagattttattagagattgtttgaatgatgcatgttattgacaaggcaaatatatatatatacacagtctgtttcttctattcctagacatattgcactactttttcagtggttcttggtcccctttaccacatcttgggtgatgtatttttgtcttcttcccctttgccacaagagatcctttcagtccctagacctccattcactctgtttctcttctgctggattatataatttaaaaataatgtgttcccgtattttgtagtggagttcatatcacattatgttttgcaaaataaaacttgttttgtcacaatattttctttgctatcgatggataattaggagtgggcacttggaataactgagggctggtgaatataataggcaatatttacatggggtgtgtaactaaataccaaatcagatagtaaggttttcccaactataatccatattcatgaaaaatgccagtgtggaaaaccatgtaacatacagaagaacaggagtttccaaattttaaccttttattctaaaaatgactctcttctctcaaaatgactttttctgtatcacataattctactgatacaactttttaccgtaaaaattaactctcttctttaatatcaagttcatcctttgcagaatcttaaagggttttccacacatccatccacccacttacagactgatttcatgtatctgaatatctgattaacctttcttttctaataccagttttccataaactcttgtcatgtacccttagtattgtgctgatcttttgccaactatacggacgtggagtttttccttttcagaatatgattattttcaatttgtctttagttagtataaagaattatagaatgtataatgtaattaaaatgtcattttgcttgc

SEQ ID NO: 241 - DNA, 91302 bp, Homo sapiens
  source 1..91302: mol_type = genomic DNA; note = NC_000011.10:c75525941-75434640 GDPD5 [organism=Homo sapiens] [GeneID=81544] [chromosome=11]
ggctgagctcgggctgcggctccggtgggggtgggtggcggggatgacagcggaggtggcagcggcgcggcgctgagcgagcggcgagggagcaggggaagaggaggaagtggagccgcggccgggagctcgggagtcggccgccgcgccgaggttcgccccgttttgcagagagagccgagtcgggacctggaaagacttccccgcggggctccggccgccgcgcctccccgccggcgcctgccctgccctgcccgtcccagccccgcggttcggggcgtgcggccgggacgcgcggagccccggccctgacccgctgcgccgggacgggacgctcctaacgccgccgtaccggtccgtggttgcagggtcgctccgcgcctttccgtcagtgagggtcggaaccccagctccagggctagcgcagtgtggccccaggccctcgcctccggtgcacgggaccccggacccccccagcctctggcttcacgagaccccaaccttcagttggaacagcttggaacagcgcgagcgcccgggaagccctggccgggtcgtgcgctcggtgaggggtcctaggcgggcaggacagtcggaccgaaccgccgggctggtgccgcgagcccaggctgtcaccttcgtcccgcctcaggtgaggggttcagcgcctgccccgaagataacacaggggtccccttctgtcccggcggcctgcgagagccaaggctgcaggtgagagccccggatgcgcggcaggagcggtccccgaccccatcgcggcagcgcgggggccagcggagggagtgtcaggggaaacaagcagaggctggaactggctgggagggggcgcgggaaggggaggggaaagaaagaaaacgggtacttattgagcgcccattgtgtgcgggttcgcgccctgccccgccccgccccgcctaagcctcactgctactcctgaaataggtgttgtgtattattatcggcgcttgcagatggagaaactgaggcttaacggggctgagtgacctcctttcactgcggggaggagactggggaagcgggagaggatagagggggaagaggcagagcacttgagcgctgatgctaaagctgaggaagtggcttcttcttgcctcccgctccctggccatgtcacccgcgaggaaaggtgactcagagttgagggtagaggtgggaagcttcccagttccaaagcttctctccctgtgggcccaggatgtgagagcagcagctcctggcccttgtgtgtcagactccagggtctctaagacactctggaggtcctgagacgtgcttatctgttggtgaattcactgcagagatccccaagtaagggtctgtcagagctggagatgtagcccctctggggtggctggagatgtggctcacgtgactcacctccctcacattactaatggggacactgaggcccacccgaagggagtgccagttgtccgatcctaaagccagtgagtccttgagccacaagtagacttgagaaaaccttcctgagcatccttcaaggtatgcacactcctccccagttaggatcttctggataggtggctggggctttccctatcgctgatgtgagatctgggcgaccatgtatgaggctgtggtgagaattagtgtggttggttgctggggccccgaggaatgcctgcaaccgcattgcctttggcccaaatggaaggtccaacctcattttcttctgggcaggggaacctgcaggatacctctgcccaggaaggaagggacctgctcaaggtctcaaggctgggggctcccagggctggggcacagtcccaggtgtctttattcccaggcaggggatgcttctgctgcccccaaggcatgtagggagaggggtgttgtgaaagagcccttggcatggactctgtgggctcttattctgtgtggggacggggaggggatatggccttggtctgggccctgtggccttggctaggcctagttaaccctagagatgcccaactccctggagtcaaggggaaaccaccttggaaagcccctggaaggtggaggagcgtggtgagaggtctgtggaagtctgaagctcaatccctgggggtggaagggttaggggatcccaaaagacaaggtgactgaggggcttgggattccctctaccccagacctctgtctggggcttcaaatcctcgcaataatctctatgtctaaacaaagctctttgatgaaataatttcacacctgtgatctcctttcatgacgtggagagagcctggaacctagagtgaagcagaggagggttgcagagtcacttgtgacctcttgatgcatccatggttccaagtgccactttaaaataggttatggcaggctgtgtgttacctgctcagttagtggggccatcacatctggctgtcaagtgctaaggggcatgttgtacttgccaagactggggaggttattaatggcccagtctcgtgtgggcaactgaagctcagagaggtaaaaccacttccccagggcctttgagtttgcttgtagaactgtttgagtgccagctgcataccaggtgccctggaagttacccagacgggctaagcggcagcctcgagccacagtaactggtgaatcccagatagtggtaaatcagacagaccaggtgggcgtgagtctactgtgcctcccactagctgagtggcactgagcaaatcacttcatccctctgagcctataaaattagaatacctcctttagcaggttgttgcgaggattaaatgagctacaaagatgcagtgcctggccaaatatccgtttccatccctatgaagaaaaggaagcttgaagtttgaccaggaagtctggggaaattctcagacttgtcttcgattagaacgcaggatatggttgcagggcaggctcagagacctgaatttgctcagctcaggctgctgtgtgggtcacactcccctagtctcatagcctctagaatcagtctgcttggggacaccggcaaggggctctggattcttaccccctcccttggcttcctgctggcagggctgtggtgcctggagctggtgtccattccctcgggcccattgtctgacctccctaggcaccaaggtgcagtgaataattaatactcccctcagctgggggcaggctcagggaaatagctctatgttcagtgagcttctgaaccctaccagaggaggtgggggctcctgtctgtgctgttagcagtcttggatatgggggggcaggcaggataggacagggagaaagtgtcatctggcccccaacaggagagagctggggttgatgatgtcctgtctcttctgttgggggccagatggtcccacaggcaacactgggaaccaagctagctgagctaggatcaagtgggcctctgattccagagaggtggtgacggggaggagtaagggggagggtacagggcagaaaggggtggaggggaggcccttgaggactggagtaaccaggaaggctttgtcagggaggtggctgtctgggcaggagctagaggaaacttgctgcaaagacggggggtcctgacatccctccaagaaggaatcctggctgtgccaccgcctcactgagagcatgggaaagacacatgatcccatcaggcctccatttccccctttgtgaaatgacggttgtgatgtccacttctcaaggctgttaaggatcatcttgaggtcccatgtgtgaaacacacggcactttaggcactcaacaagggggtgcctcatcatgagtgtgagctagtgggctagtggcggggcaggtgggatagcgtggtaagccgagaggtagggagaacttggggcgaggaggatggcttggtggggttagtgaggggtgaatgcccatataggagagggccttgaatgttagacagaactcacatttcagaaagcttaatggagcccccatttagaagcctctgtggctccttacggcctgtaagatgaagaccaggccctagttatggcattcaggtccttggtcaccttagcctctgcccggccttctggctcattgctctgcactgtctcctaaacacaccacatgtggccccatcacagcccctttgtttgtggttcctcccatcagaaccgccatccctgcctctgctccacttacctccccacctgtcaagacctgactgaggtcataaattccctcagaaacattcctggattacccaaccctctggtcatgccccctctgaatctttaacattcagcagtaatagtaaaaaataatacctactatccataacattttgcagtttgtaaaatgtatccacacaatactacagtgatgatatcaacaacagctgatatcttgagtacttactatgagccagacaatgtgctaaatgttttatagacactcttgttcacacaaactccctgaggtagctactgttatcccctagaaactggggctcagagaggtacctgatcttgcccgaggtcacacagctcaaaggtagggagcagggagccaagctgcatctgtttgaattgtaaatctgtgcttagaagatgtcctgtctcctcacctccacccaagtaccttgaaagcatactttgtgtgtaaaaagcctggacaaggttttttctcaaggctaaggaagggcagtgttggactgagcatggggcccaggaaggacctgggccctaggccgtgcacaggctggctggttgtctgtgtgacctggggtgagtcggcccctctctggggtcccgtgtgtccatgtctatggggagcagggtgggttctgagctcccctgtagctccagctttctacatcgtctttcgtgaccctggagggaggaggaggagaccacagcaccagggccagaggatgtggtatgacgggcagctgtgatttttggcctggccactgtctgggccagcaggctgtgtgggtagctgcctcgcccaaaggagggtggtggcctgagctgcaggcagcatggtcattagctggcagaggagaccctgtgattgggaactggctgggccaggccaggccaagttggcgggactggaggcaggctggccgggccacagcggggtcactggcagggcagccagcttctcctccctttgccccctttggggtggtggcaaacacacactgggcaccagagctttgtaggccaaggcttaccctttctcctgctgtgaccatgggaaagagcagtaaggagttcaaccaggtccaaagatgctgcctgctataagcttccagtactcctcccatgcaggtgggatccaagcctcctctgctgctgattcatggccctctgcacactgactgtggtctgtggattggggttctgcttggtctgcttcccttgctggcttgtcaaaactagattctatgtgcccccaccgaatcctcccctccctctgagtgcctagcagtgtgcctggcacagagccacaccctccgggccaggggaggcagtgcaagctgccccatggacaacttgctcaacttttgcacctctgttttttccctgtacattggggctgataataactgttattaaatgagatgaaggaagtggggtgcctgtccaggcctggcacacaggtgggtactccatcagcatgagtcttcttgcccatcccctcgatggcttcgtgaacgagcaactcagtaagaagctgatggaagagtccagtgagtgatggctggagggagggcgtgccagatggcagggaggccttcccttagggggacttagctggggtttgcagattcacagttcccaccaccttccctgtgaacagtggtgtgtaagcaggtgctgttggcctggaagggtcccgagctaggttcaggggagggagcaggactgggatatctggggacttgggttttcttctcaggcctacgcagaagaaatgacccaggtgggagaagccgtctggcgtccagctagcagatgctgggcagagagtgtgagttcttccttaaagggaagcagcatttatttggtgctgctcacacacacatccaaccgaaatgtaacatggttggagattctggtctgtgggggaaacagcattagacaaggaaacacacagatgcaaaacttccaaattgtgagaagcaggctcctgaggcaggggccggtcccatcagtatctgtggctggtggcacagggtagggctaaatgacttgggcaagtgatttaacctctttgggctttagtttccccatatgtaaaatggggataattacagcatcttcatcatagagttgtgagggtgaaatgaattatacgtgtaaagcactcaaaaaaatgcccagcacataatgagcactcagtgcaggttagctgttatgatctgtatctccagcacctcacagaggatcttagagaaaacaggtgctcaggaaaggcgtttggaatgaatcccaggcaaagggcagctgctccgtggaatgaatgaatgaacagcctggtagggttgggaggacacagaagcagtgacaacacagaatgtgacagggaaggccaggggcctggggttgcccggcgctgggtggggaggggagtcagggaagccttcctggaggtggtgcccatgttgctgactttggacctctgtgagatcagcactgaatgagctgagagaggagtagctcctctccaaaggtagctggcaaggaggagagcttgggcagaccccaggaccagtggactccacaggcctctcacttcccaccaacccacaccatctctccatctgtgacattctgctttcagggcatgaggaaggcggaaaggcaggtggggaggaagtgtgggctgctggtctgacaggctcagctcttcccaggcttgtgaccaaatctcctgcagaaaaggataaacaggcctgctttgagttcttttatcttcttgctcccaaggcacaccagcaagcagagggggtcttccagcgttaatcctgcagctgtttagcttttgaacgagtggactctttaaaaaaaatgccacgaagaatgtctcactctctcacccaggaggctcaaagagaaacttctctcccactgacaagggagctggaacccccaagtgtcttaaagaagctcaccccaggggcagtctgaaatcaggggacccctcatgctgcctcgatttgttgctggctgtggggccttgaggacacccttatattttgcttggcttctgcccattttgtaaaatggggtcagggtaataaatcccttctttccttagaaaggcgtgtggcaggagagtttcagaggtgggaagggcagcagtgggcatccaagcccatggctttcaaactttgtttcacattagaatcatctgggaaacttttaaaagtcctgcaggccccacaatctctggggcatgacccaggcatcagtagttgatgaagctcccctggtgatttcagtttgagagccacctggctgccctctgcagcctacctcccacagtgtcccaagacaatacttgcacatccccaggacaaggagctcattccttccgaggctgcttcctccccccaggaccttcctgcctggagagatgaggggagtgggaagacttggtaatccagttaacctgggttccagcatgcagctgctccctgcgtgtcttctcggagcctcagtttcctcatctgaaaaatgacaataacgatctctctgaaagggccacagaggccagacgaggccacacatggcaagcacccaccccatacctgacgccgggctggactgagaccctgaactccctgccccagccacctgaggccaggtctctgagactggcgctggttagggtgggatcaacacccagcccgggggcccttcccactgtcccctttctctctaagagataagacaaggcagtaagcattttgttttgctcagttttgctttaatggtcaaagtgtcagactctccttaacaatgaagccttgtctgaatctgcttgtttttccaacccggacacccaactgcaccacctgcttggggcccctgtcccacctgggagaactgaagaatgtcagaggatttttttttttaatctaggggagggtgtccagggaacattggaggcctctgtgcaaatcctcaccgataattgaccccacttaagtcatccaactctgctgtgattgtgagccagttcactaaaattatttcaaggtagttactaggtgttgagctaaacccctatcagtgccagtgaggatggcaccaggctcaagaggccaaagaggagacccagagccagcgaatgagccatggggttttactacgggctcacacacaggggagagagtccagtggctgctggctggaccgaagaaccacaaccactcgcaggaagtgtgcagtttttttgtttttggttttggttttggtttttttttttgagacagagtttcgttcttattgcccaggctggagtgcaatggcgcgatcttcactcactgcagcctccgcctcccaggttcaagcgattctcctgcctcagcctcccaagtagctgggattacaggcaagtgccaccacacgcagctaattttgtatttttagtagagatggagtttcgctatgttggttaggctggtctcaaactcctgacttcaggtgatccgcctgcctcagcctcccaaagtgctgggattatagctgtgagctaccgccccccagcctaaaagcttgcaatttctatagcattttcacttagcacctcccccaacaacttccacctagcaacctccatttaccccaaaccacagacctcaatcctctgtttggcccgcaagttccataggatgggccaagagctcagatgttcctcatagataaggagtggatctccgggttggctactcccagattccttagcttagaaccaaactgcattgaggtgcgcctgccatacaaggtcattctcagggcttgctcaagtccaggtatcactgtccaacgtgtctaccatacagaagacagaaaacttatgttgatcctggctttgtcacttactggcaggatgaccctggaagaatcattttatctctttgagcacgagttgtttctcctataaaatgcatttgtaggaaggacttcctgggattacctgagaagcaaataaaattactggtatgtggagcacagtgcctaccgtaaactaagcactcaagagctgttggtgcatgcacttgctggggagctgacccctgcctcctgccccttccttcactggctggtccacgctccctgtctcccagtctgctccccttgccccaccaggcccaggctgagacagaggacagaggaggcctgcacatgtaatcatgggcatcccttcaaactgctcttctttaagaccagaggaggctctgaggactggacagaggaagactacaaaaggggccatcagtggcagtgcttggtctccttgcctgggcacagccagagagggtacatcaacccagagtgactggctcaggcattaggcgtgtgacaaatcaacacgggatagtgcagcaccgagggactagcagtggctgggagcagttaccactcagggctgaaggagcaagggaagtgggcagctatagggataggggctgtgggccatcagtacagggacccagtcaacccaggagacctcacaggggataaacttcaactatctttcctctttccttcagtcccccatttatgcttcctgttgggtgtacctctctgaaagccagcagcatggagcccattacattccacagaggtcagttcccagggccccaaacaaggtagagagtggctctggagaagcaaaccaaagacacttcctcactctgtccatcaaaagcccgggagtccactgaatacactgtccttaggacacagtttaaagatcatctgtttttaccataccccttaatgaaggggctctcagcccttaccccaaagatgaatcagcagccgagctgccacagacacctcggcgagaggagttttggaggtacccatctctccctctctgcctcctccaccaaagtaagctatagatggcttctggggtgaccctgccagggacaggggaacctctggagtggagcagaagtcacaggtaggctagtgtcaggcgagttcaggtgcacagagcagcggccccagccctgctgcgacttgcccatcccagagctggccatgatgtggccacttcacacaccttccttagagctgggcagtcattgccacagttctggggatagccctggacccagaacatgttcctcatgtccagggtgttaagagccatgccactctgagttcagagggtctcccaggagcctatgaatgtcaggtaagaggagcgtggggctgggcaggcctgggacaggccgtgcagcaagtgccaccaaatgctgccaggccttgtgatggggagtctgggtgtggagttaggtggggggtgtggttcttgccaggcagggagcaggaggcataatggtgccagagactgagccttgcccaagaggaggcatggtcagggagaggacagaagatatgacactttgcatggaaaccatgtgggaggcccccacggggtgttgtctgcaggggcacagccggcaggtctaggacacagagccctttacagctggctgccagcgagcactccctctccttcctgaaaggaatgcccctggcatctccaccagctcacacctaggcatctgaggtgacacagtgagatgcccatggcaggtgtggtaacacctggatcctcagagacttcctgagaagggaggtatgtgggcctcggagtcagaattctggcttggaatcctggctctgcctctcttgagtggaacttagaagacatgggcaagtcacttagcctctctgagcctcagttgctcacctataaaattagagcagcaacacttaccttccaggctggtttgaaagtaaaatgacataatgaatgagacagcatcctgtatttcagaggagatgctacagttgccctcatcatgccccccttctctgtatgctgttcatgcttaatgcctctgcaggaagttctttcttgagactaattgaagtccactctgctgcaattggagccttcttcctcttgctggggactctgcagaggcagactgagcccctcctctgtccagatgtgccctgtcagtgcctgcagtgagtgaagcagagaactgggtgaccaggtgttgattttcaccttggagcttgggggttcaactgtcaatggccagagcctcttgaccatggcaggatagggggtgcatcatcctaactcttcacactgttcttcctctctgtgcttaatgcatgctccaaaaggggtgactttgggcccgtgcagagagccctgggctgggcctaaaggcctgggtcctggcacctccgtctcactgtgtggcccaaggccagttagcaaccatttcgggccaccgtgggcctgcaaggatgtctgtgctctagggcccaggtccctccagtgaagacatatgtagttctgactgaagacccttctcctgcttctccccctctgggaccctagccaacctgggaagacagcagatagggtcctgctggtggctggcagtggtagcagctgagtccatctctcagaccaggactgccaagggcaggccgagaattcaaggttagatgggtgattcctggtaggtagggttttgcctccctcctcaaaacagagcctggtgctccccttcctacccactcagctgaactcacccagctcaagggcagtcatgtttgagtctctccttggagtggctcctttcccacatgagatccgctttcatccctcattttgcaggtgagaaacctcgggctcaggcaggtgaggtgactggcttgaggtcccacagcctgtcggtgggaagtggtgagggtccctgcggcagctcccatggcacctgggccaggccgtgccctctaggtcctcagcaggagtggagcacaggagagtcaggaggctactagccaggtggtctcctggtctaggaggaggccctatgggtgccaggggaaccctgctctgtgggccttgaggggtcatctggggctcctgggattgctgggtccctttccctgggaggaagttagccgaggaatgccagaggttgagagcgaggaacccaggagttctaggctgtgactagttctgagtgcccctgtaaacttcagtgtttagtttcacggagagtcaagactgactttttgttgactttggacacatgacagtttaactttacgaagcgctctgatatctgtgatgtcattgcatcctcacagcagtctgtgaggaggaagtgtgggacttgtttgggagggcaggagagtgtgggctctggaatcagacacaccggagcttacaccctgactcccaccggctctctgacctcaggcaagttggtaaccagccaagtctcagtttgctcatctgtgaaagggacaatttactccacaacaaattgttagcaacacctgccttgctggctgtgtgccttaagagaacatctgtaactgctgggtcagtgtctggtgccatgtaatagttttcatgatttttatcagacccactttatagaagggaagatggaggctgagagaaggaaggtgacttgtctgaggtcatgtaatgatttaaattggtcctccagacttcttgtctgtgaattttttctataaaacctccctctccatcctcaagtgacccgatacctcatttatccagaaccctccacgtgtgatgctgtctagacgtggcattgtgtccccagtgcccaacagcacttgcctggtacacagtatgtcctgtgcatagatgtgttgatgaattcatataaactgtaagaaacatttttccagaagaagcagctaaggcctgtgtcttgccctaaagacttctttctttctttcttttttgagacagagtttcgctcttgttgcccaggctgcaacctctgcctcccaggttcaagtgattctcctgcctcggcctcccacatagctgggattacaggtgcccgccaccacgcccagctaattttgtatttttagtagagacagggtttcatcatgttggtcagtctggtctggaactcctgacctcaggtgatccacctgcctcggcctcccaaagtgctgggattacaggagtgagccaccacacccagctctaaagacttctttctgctctctatcccattaaaaacaactctaacagttttggttggaaacctttgcaaaagagattgatcactttcttcctctgaacaatggcaacatggacgggttgagggacaggccttaggaaccccgcctgccttgctgagaatgccgacgcggcttgacccctgtgccagatgaccctgggctgctgcatgtgttcaactctggtttctggctcttcccaccctgtcggttcctttattctgctgcccacagacttgcctccagagcgctgcatctctttcctctcccctcgtgtgtgtgtgtgtgtgtgtgtgtgtgtgtgtgtgtgtgtgtgtccttcccaatttcatgcttctaccagttagggactaagaaatggaacaattgaccttactagaattggttcgtgtattcattcatacctattcaaccagtcagccattggtgagcctgtgtcacactggggattctgtctgtgcattcttccatgcatccatgtatccatccatccatctgtcctgattgaggacctctgcagtggcttgtgatcaatcaagacattaccacaccctcctggccatgcatgcagtaaaataatgatgcacacagcaaatgctggcacaggacttgacagtttgtaatctgcctctgcttgcattacctcaatcttcacaacagccctgagaatagcattatccccattttgcagatgatgaaaacaaagcttagcaggatggggtccccccgcccaatggccagcagtgagcacaaagtcacagttggaactcactcaggtctctggcccactctgttaccttctccctcctttgcgctacgtttggaggctgtctgatgccatgttcattatctgtctctgtcatgagctattggtggtggtggctgaggttggactttttgcctctgtcaaatggtcagtgcagggaagcatggccctggctgggtggcagccacagacacccttcaacctgcagaccttgtcccgcctggacccaggcgcactatctagtccacactccccaaactgtcccctgaggagccctagtcccgtggcatgggaatggattcaaggatgcatgagcatacagatttgggaaacgctaggtcacataaatccaaacaggccttctcagggtctttaatgtattaatacgaattagggaccccaatgggtggcagagtgtgcagccagcctttcctaagcttatttgaacatgcaactccttggtcaaagagcagggtctggacacaccgtcttgagaatgcagtgagaagatctcatgggcaaaccctgaccttgctgttttgtgcaaggaaacccccagccagagctagtttcctggcccaggactgcattttgagagagcatcacagggaatactctttagccccagaaaagattcagtgataatggtggaacttcaggcagcaggggcaagtggccgtggagatatttttattctttcatccaccaaaagaacatatctcagacatctactgtgtgccaggaacagagccagcacttggaaatgccaagacaatctaagtctcttccatttcatttttcccccacagtgctgcatctctttcctccgagggttttcaaagaaagacaagccttaaatacatgccttaaaaggaagaagtgatctgttaattgctctgggtcgttgctttgggtgggtgacacatttactcaattcagcggagctgtaccttcttagtcccaggtcctgaggggcagagagtgaggcaattccaggacccattaccctgggcagagtgcacagatgttgcaagggaggtcaagagcatggggaggcccggaggaggaggaggggggagggggagaagggagcgagcttcctcctggggtccatcagtctcagcttggggttggggggcacttaagtgaggctctgcgaagaagagatgggggagtgggggtggatgggctccaggtggctgggaagggcattcttccaacagctggagcagaggtgaaaggaggcagcacatgacactgtgtcatgaggaccctgtaaggagcctgtggatgtgggagcagagggaggaaaaggaggtcagacggggctggagaagtttctggggcagattttgagggtctgagctccagccaagtgggtgcttacctgatgaggagcctcttcagagctggtcacattcatcccagtgtccccagcacctggctggtgcccagtgggtgtttgtggactggctggactcttcctctgtaggcctcgggttcctcacatttgtggtcaggcgaggtcacctggcacctcccttcctactctgaagagctctcaggagttctggatgcttgtgcaggggaaggcctcaccactctccctgtctcctgcctcagggttctctgggttgccccagcagggctggggccatggtgccctgagtgggggacagccctcccgctgccagggaactttgcccctcgtgctttctcccttcagcagttggccccctgagcccagaaggacattccttggtgtcccgtgactgggagtggcagtggcattgagcgcatgctgcagcttagcacggggagggagctctgcttccatctatgtgaaaatgggcagccaggtgtggtagctcatgcctataatcccaacactttgggaggccgaggcgggcagatcacttgaggtcaggagttcgagaccagcctggccaacatggtgaaaccctgtctctactaaaaatacaaaaattagccgggcttggtggtgcgtgcctgtaatcccagctcctcgggaggctgaggcaggagaatcgctggaacccaggaggcggagattgcagtgagctgagatcgtgccactgcactccagcctgggcaacagagcaagactccatctcaaaaaagaaaaagaaaatgggcaagtgactcagcctctgagcctccgccttcttgtctgttaatagtaacttccacactggacttttatgaaggttcaacgagataaagtttgaacatggattataaactgacttactccacaaacaagtaaacagttcttggcattaacaatattcatttgtccaatttatattaatcccccaagcctctgggccactcacctcttttcaggaagtgctccctggcatcagctcactgttctctgtgcaagctgcccctgctggtacattttatccaggccagagcaataggagcctctgaattatgtacaagtcgcacacacaggccagaactgtgtgtctgcagccctgtctgtgtttgaacagaaagaaagatggtgctgtccttcctatctgctgggcccagggaccagataccgccccttccctggctgcaacccaggggtctcggcctctgaggaaggctgggagcacatgtcaagaacaccccccacacccaacttgtctgtcctgtttacagtctgggtctaacatgacctgcccacatacaggagcctctctgtgtcctgcatccctgggtggctggtgggcatagggcttgaggggcagaaaaagacagtcactccacatcccttccacttccctgttcatgccaggagctgtcagtcgggatgaccaagatcttcaatgtggacactgctttatttcagcagggcctcaggtaccccctctgggaggcctgcagcctgtcacagcatgctgagccaaagccacctgcccagggtaggtgctggagggacaaggctaggttgtgcccagcaccccttcgcctggaattctgggggtccctctcagtgcccttgttcctgagcagctccagatggtcctggccctatgtggggggagtaggggcagacagctggtgaggctggcacccagaggcatcacagatcctccctccgcttagattggcatgggggccacagtgggggaggcagagtggcaggcagggagaaagatatagtgggatattgatgtaaacctaagcagattatttttataagatcccagtgaacaaacgtcaatttacccctcctccaactctccccctgtcttaaaaagaccaagcaggaacacacctggcttcctgtcctggctccatccgtgtgcctgtgcaaccttgaatttgtgcctggggctctctgagccttagctggcctcattttaagatgctgatgataaggccaacgtcacaaggctggtgtgagatcaaatcaacccagtgggtggcacacccaggaaggcaccggatacatggcaggccaccgatttgcaaggcagatctaatgctaggccagagcaaagaaattggatgtttttagatacttgatctgtggtctctgtaaacaggagagaggaaattcttgtcaacttcctcaaaatgatcagtgcagcttagacacgtttttgtaccttgtgactccacgaaaaggacttcaaaattacccaggtatttgttgacctttcccctgggaccatgtaaagccactgggtgtgagtcctgactctgtcatattagccaggtgacgtgggcgagtcccttgtcctccctgtcctataaaatggagggaacaagtacctaattctcaggctcattgtgagcttcagatgagaaataatctataaaatcctactgtggaaaaaaaaaaagcaactgatagatagtgggtgctgggggtgggtgttgggggatgatggcccagagtgcgggtcaagggctcaggcagctgaggctgggtgtcctgtcctgatgactggcaggctctgtgatggtcaatgcgtgtgtagagcctgatttgctttccttaatgggacagctgcttaattagcctctgagtgttcctgacaagtgtccctgtgagtgtccccagcatctgacagggtcagctctctccagaccatgtgtgtgctccactggccagccttgggtgtgaagcattgacccactgtcctatcctctgattcttggcttgtcactcagatggcctcgtggggcaaccactgtgttggggactaagggaacaggagacagccctgccttaagaaccccggtctgggctttaaaggaggaatgtagagaaggctcagtggctgtgacccagtggggcttggaggcagccagtgccccccagcctgggaaagattctgcctggctctgccaccagttctctatgtgaccttgatcataggccctttctccctctgggcctcagttttcccctctaaatgaggatgttggaagaagtggtcccaggaagctgtggcctacagcaaagcagggtgaggggagcagtgatctctgaagccagcccagcctggggttcttggcccagctgctgcactttctggcctgtgaccttgggtagcccacccagcctccccatgtccgcctgacaggggtatgctggccctgctggcacagagcagacactgaacatcctgcccagcagcgtctggcattggtgggccccagggcagctttggcccttctcctctttctttccctgtttgtcctgcagtgcccagaagttccccagggagtcttgcgccagtggattaggggtggcgtaaaacaagtgttgctgacctcagtgccgagtccaccatgctgtctgtgctactcccctgcctggggaccacaggattgggatagagctggccatcctctgccacttaagggttggacagagaaggggaggggggcaggggcagggtgcacactctagagcccagcattccgtctttgttggcatcttggaaccttggtccttagaaccgtggactctttcagttcccaaatcttggaagcactggatcatggaaccatagaatctcggtgatatgaaatccagacttggaggaggcctaaggggtcacaatccaaaccttcatccagcccaggcagcccctctgcaggctccgtgaacactctggcaactggggagtcatctgtagccccctcaggtaggtctcagacttcggtcagatcacagggctgcccccaccctaccttgtggtcttgactggccgctgtgatggtgtgcctggggctggttagtgctaatggacagctgggatggaaccaggcctctgctcagctaagaatagaaggctttgtgcgatttaagtagcagccggatcatatcaggcctcccagccaggccctagggagcttattaagaggctaccctgggtcctcctaggtggaggggcagccactggacttccccggggttgctctcttgtgtttacctgatgatgaattttccttttcctatcaagtaagttcatccctcctccttcttcctccctggggctggctggggagcatcacccagtgttcctggggggagtgtcttctgggaagagcccaaacaaacaaagcgtccctgagaggaacaaacagatcgatgaaaacgtctttgtctggaaaggagagaacggatgatggcaaccttttattgagtgcctactgtgtgccaagcccttggctcagcattttgtgctcttgccatatctgaccctcccaaggggctctgggaagggtccttatccccatgatgcagatgaggacacagaggcccagctggtacttggcggagctgatattggaaccaaggactgccccgccccattccttctgagggagaaactaggggttcctgagagccaggggaaagaggcaagagtcagaattcttggagagaaacctaggcatggaggattttgtctctctgactgcagtgattcatgctttaccttatgttagagtcttttccacttttggcagcatggaataggagaaacggttctggactgagggaggaattatggccctatcacaaatatagtaggtgcaggcacatgttggttaagtttgaattaaaccaaatccacttgggtctcagatttcccttctgtgaagtgagtaaaggtcgcctggggcaggatcatgaggctgtggctccagattcctggtcttttgatcagagagtgtcctggtccccactctctgcaggtctctggtgcctcctgcctcccactcagagattattcccagtgtgagaattggaaggacacctaggaattgcaggtcattctctgatggtacagacaggaaaacaggggccccacaaggaaaaggactggcccaaggtcatgcagtgagtgggcctgggagcacatagtaggaaatcccttcttccttccaagccaatgcctgctctcctctggggcactgcttttaggtggtgatctggagggctgggggtggggctgggggccggaggcagctggatcctgagagggaggcaggggccaaaggtccaagcctctatctgtggtgccccaggcccatctgtgcttgcccaaatcctgtccagctcaaatgccccctcttctgtgaagccttcctggactccccttcctaataccctttctaatctccctatctacctcaagagtgagaggttttttttgttgtttttttttttctgagatggagtctcgctctgtcacccaagctggagtgcaatggcatgatctcggctcactgcaacctctgcctcccgggttcaagcagttctcctgcctcagcttcctgagtagctgggattacaggcatgcgcacacccggctaatttttgtatttttaatagagactgggtttcaccaagttggtcgggctggtctcgaactcctgacctcatgatccgcctgcctcggcctcccaaagtgctggaattacaggcgtgagccactgtgcctggccgagtgagagtatttttaaaaattgtattatttaagttaacaaacataaaatgcaccatcgtaaccatgttaaatacagttccgtatgttaactatattcacattcttgtgcaacagatctccagagctttttcatcttgcaaaactgagactctatacctattacacaactactccccatttctccctctttctctggcccctggcacccaccattccactttctgtttctgagtttgactattttagataccatatataagtggaagtgtacaatatttggcttatttcacttagcatagtgtcctcatggttcatccatgctgcagcatgtggctggatccccttctttgttcaggcggagtgctgctccattgtgtggctagaccacattctgtctgtccgttcacctgtcgatggacccttgggttgttccacttcttggctcttgtcacaagagtagggagttttgaagttggatgggcctgggttggaccctggcttttagcctcctttagctgaatctaaggccctcctcacctgccaccgtgcccagtgggattgctgcaaggagtagaaattgttcatgttgaaatgcttggcgtacagcagacttgcagtgagtagtaggtgggattcattctcgttttccgctttccctctagggacaggtcccttttgcccatggctataggacccacagctcacctgcacccatccatgagggcagctgagcatgtggtgaatctcagaatattggagctggagagcacctgtgcacagagaggggcagggactcattcaagttcacccagccagtcaatggccatgccaggattaaacttggctctccagcctggggaccttccccctccagtccctgagatccgcaagccttgtccttaggagggatcagctccccaggggcctatgtctaatcctgcagcattcagggctgggggaggcagggggctgggagatgaacatctcaggaggctcaagagatgagcatctgtagtgggtggaggccaatggcacctgctagtctcctctgatcgcctgactttccccagggctgtggacagcggagctgcttcagcaacaaggagactcacgtcagactcatttgcatggtgcaggctctctaaggtccttgccttgcacctgggagctcactctgcttttgctcactttcattcattcatttgcctattccttccttcgctcatttattcagcaaccactccctgaggcctgctgtgggctgggagaccaatcagaccttgcaggcagtcagtatggcatagcagtgaatagtgtggattctgaggctaaactgcctgggttcaaatcccagttctgccagttactacctctatgaccttgaacaagttgcttagcctctctgcctcagatccttctctgaagtgaggagaatgatagttcataatttatatttgttccagttactgttgtcacgtaacaaatgaccccaaaatttagtgactttatataggaacaatcatggctgggcgtggtggctcatgcctgtaatcccagcactttgggaggctgaggcaggcggatcacctgaggtcaggagttcgagaccagcctggccaacatgatgaaacccccatctctattaaaaatacaaaaattagctgggcatggtggtgcacacatgtaatcccagctacacaggagtctgaggcaggagaatcacttgaacccgggaggcagaggttgcagtgagctgagatgtcccactgcactccagcctgggcgataaagcgagactcagtctcaaaaaaagaaaaagaacaatcattatctcacagtttctgtaggccaggaatttaagttgagctcagccttgggctcagcccagtggctcttggtcagggtctcacttggtttctgtcaggtggcgtctagagtggggaggagctggggcacccggaggtttgcccagcttctctcactctttgcgtagtctcaggccttcttttctctctctgcaggcttgtttgagccttcccacagcaaggcagtctcagagcaatcacagtgtctacacggtggtgcagggctctagtaggagtgtcctggtgaaggaggcagaagctgcttcacactcaatgacctgtccctgaaagtgccgtagtgtcacctcagccattactcccaagccttctcagattcaagtggggggacagagacgccacttctctccatgggactggtgtcagcatcactttgtaagaagagggtgtaggatgggagacattgctgcagatgtctttggaaataccatctgctacagttgtgagagttagatgagtaaacacaggaaatgcctagaacaatgcctaggcatcatatataaatggtagctagataaagccaagggtgattttgaccatatgcaacttattcgtgatgtgctgaccttaggatgtgactgccactgtggaagccaatccactgaatagcagcatttcccatttgggtattgagggatctataggagttcaccaaactgaggcaagtggaaaggcattctacacagaagaaattaactttgcaaaagtgttgagctggagaagggagtccctggagcagggacttagctccaggtggcagggctgccctgaggtgaggagggaaggaaatgactggaaagtgagttgtgggcaggttgaaaaaagttttgcgtgtagggtttgtacttaatcctgtaggttccaggatgtccttctgtttctcaggcagcaatatgagaggcttgagtaccatcatgaggaagccatttctgagggcaaatcaacaggatctggggagatactggacttgggggtgtagggagaggtcaggactgatggggctcacacccaggtgtttggcgcgggtcatttacatcagttttgaatgtgatacacatacctaccctggcttgctttccctcctcttccagtaaattagaaacttcatgattgttctctgctcagattggctctttggtaggggagggtggaagtgtaactcccttggcagaggggtctggaggagcctagcagggccggtggcctcctcctctgcccccagccctgtctgtggagagcggctcctgctctctcaccctctcctctcccagcacccctccccactctgatcacagcctcagagtccaaatggaacaggccagactgttcaggtggctgttgccacgtctccctgagcccctgctctggagccccgagcaccagcctggagccctggcccagccaaaggcttcacccctggagcaggtgactctgagcgaggccatggcccgagtccctgtttccaggatgtttgtgtccctgtggacctgtctttgtatggctccatgtacttctgggagcctgtatgcttgcgccagtgtgcccactcatgtcacctgtgtctgtccgtgaatatgtgccctatgtctttttggatgtctctgtgtgttcgcatgtgtttgcacaagtatgaggtgggcctcttaggctctctcagggcccccatggttatcttgtcataaatggcagtcaggttagggtgctctgaaaggggctaagtgcgaggaggggccgagccagggtatagcccttgcccctgggggcctgtggtctgagggaagatccagacctcaccaatgtggcaaactcagcagaaatacaagttcccagatttgagaaacctctttgggacccctcatgctgcacttggcctcggtgttggggacccagggtcagatcagaccctgcccctaccttccagagccagcccaggcagtcagctatgcagttggacactagcgtggctgctgaatggatggctgtacagggcacaagaaaacaggtgaaggcatgcccaggcctgctggagagtcagggagggcttcctacaggaggagtttgagtggtgactacagagctgtttgggggatgagaggaaggagatagagaacagagctgggcttggcgtcagatggcactggcgggtttgaagaaaagggagatggggagggtgattctcatcttccaggcctggaggttggagggaatggaggtgtcttgaaatgcgtggaaaggaagaggagttcccatttggccactgtgggtatgagcttcctgtgggatgtccaggtgcagatgaccagagggttgcaggatacttgagtcttgaacttggtccagccagagatgggtggttgaaaccgtggggtggatgatactgccaagaaggatgtgatgggcaagggagggaaagggggcttaggattgagagcagcagcattcaggcctgggcagagaggatccagcgaaggggctggtgaggtggggccagaaagggggacaaacaaccaggcaatcagtggctgaggatggagaagtgccccatggatttacccacacagaagccattgttgaacttggtggcagcagagggtaatgggttttgcagtgggtgggacgaagtggagatatgggtgcagacaactctcagaagtttggatgagaagggaggagagaaagggaggagagctgggaaggggtgcaggggatgaactgcatgagccccaggcctgctcactgctgattggaaggagccagaagaggagagaggagaggccagagggaggagggagggtgaagtggtcatctgtagacacccgcctagtcctctgccaggggcagggagggtgcctggagggggtggtgctttctggaggaatggctgtggagggctgagggtgaaggaggtgcagtgctgggcaggcagccttcagtcttgccctgacctctgccagtcttcatatctgcagggtatggtggtagcagccaccctggggtgtggggaggatcccaggaggcagaagctccactagctcagagcatcctcgtaaaccaggttcaggtcaggagttgaagctcagggctgggcggggttggcctctggtggtttttgcatcttcagtgctcaccaaagctgtttcgtagacactgcaaacaagaaaggcctaggaaggtcaggacgtggatggcctgcttccaaagaggccacacccaaccccatctctgggcccagctctcaattacagggaagttcttcctttgggtctagcctaagtctttcccgctgtgtgttcccttctggtgaacttgttcaaccctgctccatggagccaagcctatcagctggccacttggagtggcggtcagtatttttacaacttgttttcatgaagatgatttgaagtctccttgcattcccagaatgtcagacccgccctgattcacaaggattgaccaaaacagggtctgagccaaccagaggaatttgaagacttagtcatcccccttggatcatctgcacattcttctcctttccttccagttaaaaaaaaaaaaaaaaaaaaaaaggaaaagaagaagaaagaaggaaagttagcctagatgaccagatgtccaggaagggacagtggcatttgggggtataaaccagctcagatgatgatggctgtggacaaaggggtgggacctgaggggaggggtcagtgcttggctttgcacctggcagacgtcaattcaagtgcatgttctgctgcttgcaagatggggatctttcacaggaaagatctgagcttcagtttcctcatctctgaaatggaagcattgatggcacccacctgagacacctgaagcagacctagaagcagaccctgagacaaggattcgtgtgacagtgactcattaggaagcttccctgctgagggaaacctgctaagggaataggaaacgtagaagcagaaagagaaggaggagaagcaagaggctatttccagccaagctccatagaaggaactttggctttgtcttccagagggacactgtaagtcataccctagggctgaccctccaggggcaaagatgctggagaattcatacctctccctcctgagtcaacagactcatgtaaggtgctgattgcccaggacctggcaccagcaagtgacagctgtgagaaaggggtgtgcagaagggggaatcccaggctgtgtggtcagcaaggggcagtgccttctgagagccccactgtgctccactgcttctctagccccaggtctttctctgtcagcttctagaggcaaaatcccacagagctcccgcccccattgttctcccagatgacttggctttgggcaatctctccaaccagtccaggtccctcccagccctagaggccctggtaacctgctgtagttctccctcccagcccacccacccagcccggagggcatcagtgacgagtaggaggtgggacaaggcttaagggcagaggttagttcaaggccatggaggcaccaaatgcccatagaggacatcaaagccactgtggcccatccccacctgagttgaatttggcttttcttcctagcccacccactctgtgtttccatagacggtgctcagggatcacttgggggaacttgcgttggtcaacacattccaggaacaaataaacaggttgcccttcctggctgtactgactaaatcctaagactctgactatgtgactctcactttcactggtgatgtcagcctgggttagccctcatgggatccacccttaactctctcctgtcccctgtgacatcacaagagatgttacccatgatctggcctccccactcaggcctctgggagtcagccccccctccaccagccccccacaacagaccatgacaggcctgggtgctagtccacactctgtcacctgctgtgtgaccttggccaagtcacctcctgtctctgagcctcagtgccctatgtttgtaacccattttgtatgtgctcaactaaaatcaggagattgtaacatggtgttaatccctgcttgacgcagtggatgcccagaaaggtgaagtgatttgccggtgatcacacagcaaaagagcagagagggccaggacctgctcccagccccatggccggttaagtgagcatcttactctttatcagctctgccctggcccactaacccctctttggttcagaacttgaattaagcccccagtggtcaggatgaactgagccaggcaccgaagtggtcagtcactgctgcaaactcattaactcatctgatacccatgtattgagtacctattgtataagggattctgtgctcagataagtacagttttactttcaccaggtttaacgtacaatccactgcagaggcctggggcacctgcaggcgccgagagagggtgcccttagggtggtggtcccagaggagaaagtggtctaaaaattccagagccccctcactgtccaggaggcaggcagggagtggctaggttggggaggtgaatgtcaggaaaacaagtttgttcactcctgggtattactgctgcctgtggtgggtccagcactgtgccaggctgggggtgaggccgggagacaactttgatccaccatcaaggcctccaccccttacgcgtcctgccacctttgttcacatgatgcgcttggtgtgtttgtctacacctttagctcatgggctcctccagcaggggctgcgtctgtctgctgggcacacaggagagctcaggaaatgtgcgttggtgactagatttttggtgtctagactggcttggtagtaagagtatgaattcaagagaccctaaaccctctcgagctctgtttaccatctataaaaaatatctactgcagccggacatggtggctcatgcctgtaatcctagcactttgggaggccaaggtggggagatcacttaagctcaggagttcaagaccagcctgggcaacatggcaaaaccccgtctctacaaaaaaaatacaaaaatttgccgggtatggtagcacatacctatagtcctagagactcaggaggctgaggcgggaggattgtttgagcctgggaggcggaggttgcagtgagctgtgatcgcgccactgcactccagcctgaataacagagcgagactccgtcacaaaaaaaaaaaaaaaaaaagaaagaaagaaaagaaaaaaaaagaaaaatagtctgcagcgggaggctaagaggcgtcagatagcgtacatagaaaccttggcctcgtacagagagtatgtccagcccttgtaaatgttgggcagtattacaatagatgggccctcggcactgtgccaggctgagcaggaaacatgagggagatggggtctggcccctgttacagccactgcacactgtacagtttacacagtcctgtcacgtcctgctcactggttctccctgtcatcccaagaggggatctgggcaggtcccagtgtccccatatgacataggaagatgttgacctgccttctagtggccaagccaggaagaaaagccaggtctcctggctctcagtctcctgctcactcctctgctcccccacctccccaacttgcttcctgctctctagaagctctttgtgaaacatgccaggaagagcagtgggcaaggaatgtggagatttgccagcccaggtgtcaggggctgaggaaaatagctatgggctacaggtcaccatgaccactgcccagctggatggcggggggcttctagcctggcgcagcagaggctgctgggccctcccagcctagccggctccctttccagggggatagtgtaacaagaactggggttggaagacccggggcaccctggctcccctgcaagatgctgttggagctgaagggactttaaggagtacagggtctgtggaagaggccagtcaagttgtgatcactgcccctgaggaaatttgagtgcttactgccctggaaatacagccccatgcacaaggcataagcataaggaccttccatgtggaaagcacttgtaaaaggcaaactggggaaggcagggctggctgacagacaagcagttgctcacagatgtgaagtcaccagcacagggggtctaggccccacaacatgagaggtggtgggtggggagtggacaggcctctcctaaatttggagcactgagagcaaaaatacaaatagagatccatgtatctttgtcagatattcgaagattgtaaagcaagccaggagactgttaaataaaatagatttgattttccctccttccctccttgacaaatataccttcacaatgtacattgaaatacgtacattgtgtacatatttacattgtgtaaagtttagttttatttgactgcgagtgataaaatatcaagaatgtctgaatttattgcacatctccgagtatattgttaagctgatgatgttcagatataaataataagacttaacaattcttttttttctttttttgagacagagtctgactctgtcacccaggctggagtgcagtgtggcacgatctcagctcactgcaacctctgcttctcaggttcaagtgattctccttcctcagcctcctgagtagctaggattatattgaatatatattcaaattatatatatatataaaattaaattcagacttatatatagtgtgtgtgtgtgtgtgtgacagagtgacagctctgtcactcaggctgaagtgcagtgggcgtaatcttggctcactgcaacctctaccttccgggttcaagcgactctcctggctcagcctcccaagtagctgagactacaggcacgtgccatcacacccggctaattttttgtatttttagtagagacggggtttcatcatgttagccagaatggtctcgagctcctgaccttgtgatctgcccgcctcggtctcccaaagtgctgagattacagacgtgagccaccatgtccagcctatatatatatattttgttgttgttgttgttgttgagatggagtctcactctgttgcccaggctggagtgcagtggcatgatggtagtgcactgcaacctctgcctgcctgattcaagcgattctcctgcctcagcctcctgaatagctgggattacaggcgcatgccaccacgcccagctattttttttatgtttagtagagacgggatttcaccatgttggccaggctggtctcgaactcccaacctcaggtgatctgcctgcctaggccctcaaagtgctgggattacaagcgtgagccaccgcatctggccatcaaattttatgtactttaaatacaatcacattttacttttagtcttttagattattgccatcaacagaacacaagtgatgaaaatcttgattataacaatataattagtgatcttgctaaagtaaagattttatggaataactaaaaatgaactgtggccacatgcagtggcttacacctgtaatctcagcactgaggctgaggcaggcagatcacttgaggtcaggagttcgagaccagcctggccaacatggtgaaagcccatctcttctaaaaatagaaaaatagttgggcatggtggcacatgcctgtaatcccagccacttgggaggctgaggcaggaaaataacttgaacctgggaggcggaggttgcagtgaatcaagatcttaccactgcactccagccttccagcctgggtgacagagcgagactctgtctcaaaaaaaaaaaaaaaaaaaagtaaacgaatgtaaatataaacataggaaaatttattgtatgttttcaagagtgtttttattccataaaatcatctattaaaattaaagctatacccatcacaattaatgaagatcagatttttaaataaaatctttaaatagacatgaaatattaattaaatttttgaaaattttatagaaatgaaactattcacagttctagtattcaatgtccatctagttgcaaatttaaagaattaataccagacttcatgttacattaatgtgagtaatgtgagttgcagaatgttgtaagatgttcctcagccaccatgtgcatttttgtgaatatcacactaattcatgagtacttttagaaccacaaattggagcaggaagaaatgccaaaataaaggatgcacagcaagaccggaatagagatgcttgcttatgcaagaaactggtgctcgctgctgtctgggaggaaggctttgacaagctaacttgtctccctcttatatatttttgccacttaggcccccccctgctgcactcctcccccaagcagcatccatctccctcctcagcagcaacacgacccatagaccttcacagcatcttaacagaatcaccttttgttcttcaagtttgagaaatggagaggcctggcgtggtagcatgcctgtagtcccagctactcgggaggctgaggtgggagggttgcttgagtccgggagttcaaacctgtagtctgccatgatttgcctgagaatagccactgcactccagcctgggcagcatagtgagacccagtccacaacgcatgccttaaaaaaataaaaaaataaaaaacagagaagagtttaactagggccttagaggtgttaggagcgaatgtttaggattacaggtcacatgagtataatgtgacagaggctcctgtgtactcttaatgaatttatttgtgtgtgtgtgtgtgtgtgtgtgtgtgtgtgtgagatgtgtgggggccccttttccctgtctaagggtgttcggggggtgggtcttcttgccaataaagagttctctatcatacaatgaacaatagacaaatgatagatcttacactgtagctagagttttatatctaggtatcttaatttactcgttcgtttcactcatgtgcatttgttcattcatttaaaaccctatatttgcaaggtgcagtggctcataactgtaatcccagcactttgggaggccaaggcgggtggatcatctgaggtcagaaattcaagaccagcctggccaacatggtgaaacctcgtctctactaaaaatacaaaaattagctgggtggggtgtgtgtctgtaatcgcagctactcgggaggctgaggcaagagaatcacttgaacccaagaggtggaggttgcagcaagccaagattacaccactgcattataacctgggcaacaagagcgaaactccgtctcaaaaataaaataaaaccctatattcacttgctccaacccttcatttcatgtggactaccaggttatagcagtcttttagtgcagtccatgatcctatgaatgaggatcagagagggtactgatgtacctaaggcatacagccagtccacagcagaaaagtcctcaggccaggcagcaaaaagtggagggtgagtcccaagtttgaatgtcaggtaaaatctgagtagatgttgctgtgtcccaatcagcttcccttccttcaccagcttccactactaagccatctgctccagggcactgggggatcctgcaggggttttctgcttgaagagccacttcctgtttggggccgagcacttccttcaggtgactcacaggctcccattggccccgtgctgggaaggcaaggtgggggtggagccagacccgggcgtgtcaccctctacctgagaccccagctgggtgacctgacacagggcagtgggcacaggctggaggtaggaggaggggaatggcaggaggatgtgagaccattctgcctcacccagcctattgggcaggatggagagagggcagagtggggatgggggcggcctccgcgtccagacaaccccacaggtagtttccagggcagccatgggcccaggtaaggctgacagcagagctgacagccctggggagactctgcggtactttccttcctgacaggcagtaaggtgtggtggaaggagcactgggatggagtcatggacttgtatttctcacaccaactttctggtggtcatttcagttttctgcccctctctggacctcaatatccatgtctgtctaatggggggaggggcttgatggctgtgacattttgtgccacttgtaggtttgagcttgaattctggctctgccgccttgctgagtgtgttcacttctcagaacctccatttcaaaatctgaaataatagtcactttaagtgttttacatatggtaactaatttaatccccacattgaccctatggggtaggttttattagtagtagtattttatacctaaggagattgaggcacagaaaggttaagtaatttgcccaaggtcacacagtaagagccaagattctaacttgtgtagttcgactccaggtcccatgctcttgactcattctggccttgctactcaaattgtggtccagggacctgcagcatcagcatcacctgggagcttatcagaaatgcagaatctcaggccccagcctagacttaactgagtcagaccacattttaacaagttccctaggtttccaaggtccaaggccccaggaaatataaagagaccatggcttctcaaacattaaagtttagaggagaagccactggtctatttatatttcctctgccacttaggccttaggatcattgtagggggcagaggaaataagtatgtttaataaactgtaaagtgctgtacattcagggcactgtgaggaacctggaggtgcagaagggcaggcctgggagtgtctcaagtgctgatctctctgtggctgtcatttccgagctgtctctgagtccagctctgtccacctctggttcacacacagaggtgtgtgtttggttatgtgtttcttgctggtgtgtggctctagaatccagttgggttggggagagttgttatattggcaccaggaggctcaggtcccagccctggctctgcctctatgtgatgtaggtaggcctccgtccttgcagcctcagtgtccctagtagacaaggtgtcagcatcctctgaagcctgcaatgctggtctgcagtctcctcctcacctctcctggcccctctgcttcccgtggcctgttggtaccatctcttttcccaattcctgggtggggggttgccctgctggctgcaggagctggcaatgggggaggtggtgcgtgagtcagagctcaggcatgtaattgtggtgccccagatcccacctccgggctaccgtccttcccttagcggctgctttagaagaacaagctggtttggcagctacctcagagaagcaggaccctgggcagcgtgaaagggcctctgcccccagggtggctgggctttggatcctggatccgtgggtcctggaggggcaggagtggttcaggaaacaggttatctgggtctgggcctggggctggtttgtgggcagcatgcgtggaggtggattgcatgtgctgggtttcatggctgggtattagatcacgtatgtcctgtcagcccatccaccagctttgtggcttccccagggcagggactcggtgtcacccatcactgggccccacacccagcacagggagggaacaggatgggtgctcactaagggtcacgtgggacagtagaaggcaggatggactgatgaatgaactcactggatttatccccttgtcctctcagctctcccagtgaagtgatatcactgcctctgtggacaagacacctccaggagcccagctcacagccaccggtaccttcttccaggtaaagagaaaaggagggaggaagaaaggagttcaagacagactgcagagggcagctgactgggttcttacacaatgtccacctcccccatgggggagtttatgaaaaaggcataaatgggattatcgtcccattttatggacaggaaaaaactgaagctctgagtagacttgtctcttgcttagtacagcgttccagatacttgtctgagagcccatgaggctgatgccatggttatccctgctttatagataaggaagctgaggtataaaggcatttagaaacttgctccattaaatacatgttagagctgggtttcaaacccaggcaggtcgccaggcatggtggcatgcacctgtagtcccagctacttgggaggctgaggcaggaagattgcttgagcccaggagttcgagctgcagtgagctatgattgtgccactacactccagcctgggcgacagagtgagactgtgtctctaaaaaaaaaaaaaaaatgaaaacccaggcaggctgacctcttcacaaaccctgtgatttactgcctctcaagagcccagcattaaactaagtttccttaacctccaatctgagggttgaatgggcttccacctccagagaagatttatattttaaaagagaatcctagagaaagtgatgcttcctccaaaggaatgaatgacaaatagtggatttggaggccttatatcatggaattagcatgaaccttcaaggtgggccagccagctcctgggactttcttcctcagcattcgagcaagctcggttttcattggtcaccaaggtgaaacctcgacatttgaaggaagggaggaaaagtttaggccccaggttctcggacctgcctggaagcagagactgctgttctttgcagaagactgtgaagagtagtgatgttcatgacagtgatgaaattagtatcctgtgccagatttgaggtcatcttacactagatatggtacagaaatgtgcaaatggatatcagaggtttaagaaaaatttgtgagagaaaagtacctaattgagtcttttttttgtaatttttttttctgtaaattgggaagaggctaattattattcagaggcagaattcaggctttcagaagtggctctgcagttgtgtggtgtaagatgctttgattggttctttttttccttccgtctcacatttaaccagctttttgactgacaactaaataggtacctccttggtgccaggcccagtgcaggggacataggtcctctatacagtgactcttctagcaaggacagggcctggcatatcttgtgtccccatcaccaggtgtggggctgcagacactataggtcttcagaaaagcttggccaagtggatcagaagtctgaacccggggaagctcccagtctggtgggtgaggcagccacggaagcagataattacagcgcactgaggcctgtgatcattctcaggagctctgccagatgatatgagcacaaaaaggaggaggcagtgggcttttgttggggggaatcagcccaagctttgcacagggtctgtttgttaagatggatgggatttggattgggatttggattgggatttggggagggctttcctggcagagggcccaacctgagtgaaggcatggaggtgggaaagctgggtaggtggtgtctttggagcacagtggtacaaggaggggtaggagaggacagagacaagattgctctgtacaagtctccactgtactcacgttcctcctcctcctccccctttcatttacttggtgtgccccactttcccactcccctctccctgggacttaggaagagccatcagaaaaagccaggctggcccctgcagctgaaccactgggctcctggaaggggcttgcacaagtcaaactgagggtgggggatgctgaaagtctctactacccccaaatagtagtcccggggccttcactggctctgcctgctccccagagaacctgtcagtgtcactgggggagaagggggtgggggcaggatctcttcttaggatggccttaatacagtcctggtggcttggagaaaactactcagccctccagggaggggagaggcctgtcactaggagtatgtgagtctagggaagccactgaccggtctggagaggctggagaaccaccagtaagagcagcacaggggatttctgaatggaaggggaggctggatggagtgcctccaggactttggtgctgatgttttgtgacttagcagtctgaaatccagggataatttgaagataccagttgaattattcaatgaggattccatgacactgtgagtcttgggtgaagtgattctagaggtccaatttggggcatttggagcctgagattttgagttctgagatgctaagctgtgccctctgggcaaggccaggtcacttttggtgactactcagcccaagctcatagccctgacctgggaaagagaagtcctttctgtaccaagagaacccaaggcccctgggcaggctcctgatttggggaagagctagtctaccttcgcctctgggccctgccagcctcctcccgagaggaatggcaatcagaggtctcttgggacagaagtgttgggtaaacaggaggccctggcatcaccgtggaaagagattaatagtgaccttaattatggcatgattgattcttggaggctctggctgagccccagcctcagccactgagtaacatttccccagagaatgaggaggcttgcagggcctgggtggcacaggccccacctgcctcttcacctcaaagcctctctccctgcctccttccaggcacctcctccccgagcctctccccactggcagctgcccctgtgacttagaattccttcctgcccctaggtctggttaccttctctgcagattccattagaatctagggctttctctgaggcccagagaggtggaacgacttccccaaggctgtacagtgagttggtggcagccggggatctctccattcaagccatcaaatgaggctatgcaatggaaaatagactgagtcttgagcaccccggaaaagctacctgcaggaggctggggccggagagcacagggcagggccggggataggtgggttccacatttcactggctgggctttttccagaatctttcctgtctcccccacctgcagccctcaccctggggccagagatttgttttgtgggtttgggtttagttgttttgttttgggaaacggtccacttggtgagctgtttgggatgccctctgccctgggagaagccccaatcactgccctccctgccacctaggcttccgctgtgctgtctccttacctaaaatgcccttccttctcccctttgtgctgcaaatcttttctcatttctgaattctgcatagatctcaccatctcctggaagcccctacacagtggtcaggaaacacagatttgtgggatccagaagagatagtgacccagtcaggaagggcttcctggaggaggggctacctgagctgagatgagcaggagtttgccaggcattgaggataggtggaggggctgcagggctaaggtggtttcataggcacagctgggttgggagcagggatggatgaagtggtgaggaaggaccacagaaaggccctggtcctgctccaaggccatgatcccggagccctatggaaaccatggccctgcacctttcatgcctggcattttactgtaagggaagtttggggtcaccactatttgtgagtcatctaggccacaatgtacctacaccttaatccctatcaaagatggtggaggcccttgggcagggccagagctctgccctggtgctcaggacgaccaggtgcctaaccttggtatgggccttcctgccactttcatccaagttttgaactgcgtcccaggagggtgactgtcaggatgcccagtgattagtcgtgggagcagagggggctcttccccagtcagaacagggagggatcagggattggccttcccttttcctcgagcagccccctctctgctttgctactgggggtgaggagagagcgggtagctaaagggttttagaagttgagtgctggaaaggcccttggagatcagccaagggtgctcaaaccctcccatgatacagatgggaaaactgaggccagaggcttggggcagtcactcagcctactggtgttccagttcagcctcagaccatcatcccagggctgggctggggttgaggccccgcgagggcagccacggccaaggagaaggggggtgtctctccatctgcatgcttgccccccttccccagggccctagcacaatgccaaaggtcggcctcccatccccaccagccctggcactgttgggggtttttcctttcctccccaatgttcctagactcattctgcctatgctttcctgataccaaccaaaatgttgagcttggccctttgaggtacaatttgcagttatacagatgctgcagctggcattgacgtggaaggtgatagaaacgtgaacaggcccgccctgtggggctgcaaccatggagagtctggactttagagtcaacagccccgggttcaaatcctccctcctccatgattagctgtttggccttgggtgaattacctaacctcttgggtgcgggtgcacacgtgtgtgtgtgtgtgtgtgtgtgtgtgtgtgtgtgtgtgtgtatttaatacactttttcaaaagcagttttaggtttacagtaaaattgattggaaagtacggagagtttccatataccctcctctgcctttctcctccccatagtctggcttattctttacatcttatattaatatggtacatttattacaactgatgaactaatattggttaattatgattgactaaagtccatgtttgcgctatagttccctccttgtgttgcacactctatggggtttgacacatgtccatcattactgtgtcatacagaagagcttcactgccctcaaaattccttgagcaccacttatttttcccttccccctgagtccttgacagccactgatctctttactacctccatagttttgccttttctagaacgtcacttagttggaattatacagtatatagctttccagattggcttctgtcacttagcaatatgttttcaaggtctctccattgctttttgtggctgggtagctgactcctttttattgccaaataatattcctcattgtgtgggatgcactgtggttggtttgcccattcgttcaggcccatgtttgcaatctgttaagaccattggcctttgctcaggaaggttgtcaaggggaggggacgcctatgcaatgctcagcacagtacccagcaatgacctggagtgcccacaccacccagcagcaagtgctagcacaacaaacagtaactattgtggctggtagtactcacaccgtacatatgttagctcagccagttctttttattattattatttatttttttagagatggaggtctcaccatgttgcccaggctggtcttgaactcctggcctcaagtgatcctcctgcctcggcttcctcaaagtgctaggattacaggcatgagccatggcacttgacctcaatcagttctggaacacatttattaagggcttaaaacctgttaaaagctggcaacacagtgaatatcctcataccaatcaaggtttgggattgcaaacaacagaaacaattcaggttaatttggcagaagagttccttggaaggaactagagttgtttccagaatctgaggggtctggagacccacgcctgggtaggagtggagagggcccaggtacagccaaggtttccaggctgttgtcccctctggtgcagctgctgctgacctcgcagcacctcacaactagtgcagacattcatgtgacttccagacctgggcacttaaacaaaaaaagttttatcgagataaagttcgcaaccatcaccactaattccaggacattttctttttttgtgggagggttggatggtggcgcacagggtctcactctcttgcccaggctggagtgcagtggcgccatctcagctcactgcaacctccgcctcctgggttcaagtgattctcctgcctcagcctcccaaatagctgggattacaggcgcctgccactactgcccagctaatttttgtatttttagtagggacggggtttcaccatgttggccaggctggtcttgaactcctgacctcaagtgatccaccctcctcggcctcccaaagtgctgggattacaggtgtgagccaccatgcctggccagggacattttcaccagcccaaaaagaaactccacacctattagcagtcactccgcctttcctccccaatcctcccagcccctggcattcactgagctactttctgtctcagtatttgcccattctggtcatttcttatacatggaatcatacaatatgtggccttttgtgaagttggcatgacgtcttcaagattcatgttgttgcctcaattcctttttattacagacctgagcacttccatgtattacctcatttagtcctcattccctgatgggtaaagtaaggctcagggaagaggtagtgacctgtccaaggtcacatagcaattcagttgagggtgaccaggctagaatccaggcacttcatgatcagaaaaggagctgagagcagtgcagtgcagtctggggggcacagcgtgggcctggcagttatgggagggagaaagggtaggggagcaggccagtgcgtcccgggatgtgaggatgagacaggacgccggaggtgcacgcccatcccagcatcctgcctctgctccatagtgcgtgtttattccatctcagtcatggactcttgcttttccctgtgcaagcaggaggctgtgcaagtacagggtaggggccaggaattctgacagaaaataggactttgggctggggaggggccttggacatcaggctcagaggtgagagcgttctcttgtcccagagccagcagtagctcttggcaggggatttcttgggaacttggctggtatcagcagccctgggacgtagcttggagaaatcgattggacctaagtaatgccattatccctggcaggaaggggaggggaggggatgggctggtgagggatggtggagagagtcccgtctcagagatcgtcccggcggccgagtgtggtgtaagtagcatgcctctgttagcagaacttctgggcacttctctgaagtatggtccaagaagtccctagtgcctcctgctcttgctgccctgtgttgctccctggggacatggggttaatgcagaccatcccatgggggaggcaggcatgtccacggtgctctcacagtgtgcccaggtaagagggagggacatgccagggatatgggaggctggggagacctctaaccaaaccgggcctccatggaggagggaacatctgacacttgaaggatcaggaggtgttcaccaggtgaagggaagcaaggctggaaaagcagtagtggtcagatcccggtcactgcctgttaggaagttcagtccagctgcaggtaagagtttggattggagggatggggctgaaagcaaggaatctggaggagtccccagccaggggagatgaggccttgaacaggggagtggctgtggggatggcgagaaaagggccttgagaaaagggtggtagagggcagtgtggctgaactgggtctgcaaggcctgggtgacaccgctggagacatccaggagctgctggctatctcgatcagaggcagagcctgggtggccttggcagcacctggtaactaaagccgtgagagtggacaagatggctgcagccaggagagcatacagaagagaaagaagaggtttgcctcccagagaatcccctacacttatgaacaggacaaaaatgcaccagggggagaggagactctgagagccagtatcagcgaagttctgggccgaggcatgacgcatgcacttctacttccctcttttccaggtttgaagtggaatttccattcctgggtgggttgtaatgtgcagtcgtggggacaggggaggggcggcagaggacatgtgggaattagtcccaggggcaggggggtcccgggaaaggagtgtgaaggcaggggaacctggggcgggctcccacgtgcattgcaggatgtccacctgttgtacctcagcattgcagtacctcctggcacttttccccctccctgcccccaattgtgtgtcctatagaagtcaaggcagcagctgttacctgcttttacagattcagaaaccaaggctcagggaagagcctgagtggccccagccacagagcaagtcaatgcgaggcagcatgaagctaggcttctttccacattgcacccgcctcctcccttcctggggaggcgggggcagatgtagtggctgacatgacagtagagaaccctgtctagggagtgcacagggtgagatctggctcccctggctgtggaccctggcctcccacccctgcgggaaggctgggaatgtgggggtgcctatgtgggcacgcagcactccccaaatctggagtatagtaaagctgagagcaccctacaccaacccccacccatggtctctctagccccatgggagccaagctgtgtccccaccccagcctgtcccccaggccctggctcagggaagccccagcagctgcaccatagtccacaggcctccccagggctccccggaacagaggctgcagcagtcaattcccagcactcaggagactctgggtcattcagtattcccagcaagcccctaatgcatcttccccctcagactgcaggctgtaatctccgcactgaggtgaagtcagcattgggtggtggtgttggagggataggcagaggccctgagtgaggcctggtggtagaagtagtgagtgggcctgaagcccagcgtgctcctacggtgcagcccctggggccttggagagtggcatcttaggagctcatctaccaagccttggctcagtgctgactccagggagcatactctgaccctccctgcactttggtcagtgcccacaggctccctttcctccctccatcatacactgcacttaccataaggctcgtgggccattagagcccagtcactgtaggagtctgcaaactttccctctaaagggccagacagtcagtattttaggctttgcaagccatatggtctctgtggcaactactcaacactgcagttacagttaaaacagccgtagacaatacataaatgaatgagcatggctgcgtccaatgaaatgttatttatggacactgaaatttgactttcatataattttcatatgtcacaagatatttttgttttgactcttcacaaccatttaaaaacataaagactattcttagcttttgggctgtacaaaaataggtggcagatcagatttggcaggcccatgggttagagcaaggtccctggagccaacctgcgtgggtatgaatcctggctctgctgggtgtcctttggtaagtgggtcaacctctctgtgcttcagagttctcatctataaaatggggatgatgatgatgatactttggggatgtaacatggtgcagtcacattggaaaagtttggcagttcctcaaaaggttaaacataaaagttaccatatgatccaggtgtggcagcacatacccgtagtcccagcaacgcaggaggatcacttgagccctggagtctgaggtggccatgagcgatgattgcactactgcacaccagcttgggcaacagagcaagaccttatctcaaaaacaaaagttaccatatgacacagcaattctttttttttttttttgagatggagatttgccctgtcaccctggctggagtgcagtggtgcgatcttgacaacctctgcctcccaggtttaagcgattttcttgcctcagcctcccgagtagctgggattacaggtgcccaccaccatgcccagctaatttttgtatttttagtagagatggggtttcaccatgttagtcaggctggtctcgaactcctgacctcaagtgatccacctgccttggcttcccaaagtgctgtgaccagcaattctatcccaaaagaaatgtgtacccaaaagaaatgaaaacacacgttcacacaaaaaactcattcacagaagcattatgtataacaacccaaaagtgataacaacccatatgtccatcagctgatcaatggataaacaaaatgtggtagatccatacaacagaatgttagacataaaaaggaatgaaatgctgatccatgctacaacatggatgagccttgagaacattatgccacgtgaaagaagcaagacacaaaaggtcacatattgtatgattccatttatacgaggtctctagaataggcaagtccatagagacagaaagtggatgagcagttgccagggccagaggagtgaagccagggtaaatagggagttacagtgcatgagaagggggtggggggttgttgggatggtgaaactgttttgggattagatagtggtgatggttgtacaacttgtgaatataccaaaaattgaatactgtatattaaatactgaattgtatactttaaaagggtaaattttatggcatgtgaattatatctccattttttaaatgcaaatccttccttccttcctagggctgctgttatagtttctgcatggaaagcacttggaacaatgcctggctgttcccctctttggccctctcagggccctaggagcctttgtgtgtcctgctcacattgtctccagggcctcggacagggcctggtacagaacatatgactgagtttctggagtcccacaggccagcgttggagtcctgacacctcagtatagctgtgcacctctgggcaaatagtttctctgctctgagccccaggtttgtcatcggcaaaatggaataagaataactcacagtggtgtggaggactggatgacacctgatactcagggtgtgtgaggtgccccaagcccattgccacctggtcacactttaccaacactggcccccagaggccgaggctcccacagatatctccagggtgccaagcagggctggggcagtagcttctggcagccacacttcaaccctcaagacacctcttgctgctataccatcctcccacaggccccacccggtgagggagctccctgtgtctggagaatgaatactttggggcactagagcagttcctagattgactacagtccagttatgggacagcagccaggcattgctccttgttctctgagcctcagtttgttgaactgtcaaatgggtttaggacacagaacctgccacttcagatggttgtgctgatgagatggaacaatgaatgtaaagtatttacacggtgcctggtgtattttaagtgctcaacacatctcagcttatatgataatttcttctaaaatgtttattttgaaagtctgctatgtgctagacactgttcaagttactgggaatacagcagaaaatacaacagacaaaaatccttgccttcatgaaaactgcattatagtagggtagacagacaggaaaaataagcaagttatatttaaggacatgattgagaaaacaaagctgagaatgtgggaaggagcttagggaatgtgggaaggggctacagttttacagaaggtgatctgggacagtctcattgagtaaaggacatgtggccaggtgccatggctcacgcctgtcatcccagcactttgggaggctgaggcaggtggataacctgatgtcaggagttcgagaccagcctggcctacatggcaaaaccccagctctacaaaaatacgaaaattagccagatgtggtgggcacctgtaatcccagctacttgggaggctgaggcaagagaattgcttgaacccaggaggcagaggttgcagtgagccgagattgtgccacagcactccagcctgggtgacagagcaagactctgtctcaaaaagaaaagaaaaggacatttgagctaagacctgaagagaggaggggaaagagaaggaagccatgcaggtttctaagggaagagcattccaggcagagggaacagcagcatgctaggccagtgaagaacatggaagaggtcaggagtggctggaggggaaggagtagggaggatgagggcctgggtgggaggcagaggacaggtccttggggacctgcaggggtgggcctgtgactccaagtgagacggagccccactgcagtgctttgagcaggggtgaccctccctgacctaggctacaatgacttgctgtgtggtgcctgactcctcacccttcccctgcctcactgccctgtgcttcctcctgcaggacaagctgggggcctccatgggcgcctgagggccaggcgccagggccgtgggcacgagtatggtgagacaccagcccctgcagtactacgagccacagctgtgcctctcctgcctcacgggcatctacggctgccgttggaagcgctaccagcgctcccatgatgataccacaccggtgagccaccctggaacagggtcagagggacccagtgagccccagcaagcctgaggggctgggggaggggtcttagctctgtctctgctgactcgctctggacaggccaatggcctttctgggtttcagtttctccctctgtaaaatgggcttatagtaattcctgaatctactgaccaggagggcatggaaggagtttgtcctgttgacaagttgttaactctcctctgacattgttgaggttgggctcctctagaagggaagggtcaccccaaggtgagcagaagttctcagcttcctggcagatcttgacaggcaggcaggcaggcaaacaggcaggtgctggaggagagggtgaggagatgggcctggccatcctggagcctgggagctggcagggccacggtctggcaccggggctcagtcacctgagccacaggcttgccagagctggcagcaggtgcacagccggataaagaaagcctccttcagtgctgggcttcccaggccagacctaagctgcactcctgtccctggggcgctgtcagccagtggatctagtttcttctctgaaggaacccaattcctgtgtggtgtttatctaaaagctttactgtctggagaacaactttcctcctccttcctgcttgtctgaacaaagaagccagcctctaaattcagccagccccagaagaggctggagtggccagggggtggcagggtgtgggccggggtgggggatggggagcggtggctgccgctgatgtcagaggcccagtaggcctggctgtctgtctggggaggtcggggaagcttatccacctgtctgccctcctctgcctgtgctgatgacggatagagccctagactgaggagcctgggttcgtcacctccaaatagtgaaaagcaggaactgccagggtgggcaccaggcctgattcattgccatctccccactcccggccacagaggagccaagtggccaaactgaggcaaaggagagggaagggcctgcccaaggccacagggcaggcccctggcaacgccaatactagagccccggtctctccactccaggcccctgctgggaagccctctgagataccatatgtcacagctttccctcttatgtggaggggtacagaccgtgggctctggagtcagatggattcaggttttggtggtgcatcctctacttgaatctagttgcctgtgagctccctcaacggtgaactggaggggagacacacccctctcaagttgccgctgggccatgacatgtgatgagggctgtaacgtgactggcacagtgccagctatgactagccattgagacaggtccttccagatgcccaagcctcagcctctccatctctgaaatgggagataggttgtgatcttggcttcagaatcccgtgaccactctaccgtgctccacactttgttctggatctggacctgggcaatggaggtccagcagccactggtgtgaatggggtggggagacagctgaggctaaggtgagaagaaggatggctgagctcccaggcaggaagccccttggccatcagggcagatgctggggaaggcgtatctcccagaagtctcatctccttggtgggcccaaggccagccagtcataggcatggagtcaggaagtgatgatcttggctgcagccagcacagggcccagagtggaggaagtgggctgaggctggttttgagctgactgagaaccagaacagaatgtgccctgcaaggctagggtctgggtcaccaatctgaggcaggggtctggggccaaggctggaggggcagcagggggccatgagctaggctaggagagggtatagggctttacagcagctctgggtggcagcgcctctgcagaaagggctgagctcacctcaggtgaccccaaactcacagctgaagatgagcatcctctgctcccccgcccctttctccctgcagtcgctcacttcgctccgccccctgtctcctcctacttcctggttcccagcctctgcccctcatcctttctctctctccccatttctcttttctctctctattccttcctgaggcagctgggtgagggcagcggtggggctggactctcacaacgaaggaatagcgacctagtgtctcaaagacagggctggtgcagggtaggggctccagaaatttcgctgaacaaatagaggtcttgcgtaagctctgcgggggctggtagggagaggagagctgcctgagttgaggggtggtggagacggctcttccagtgagcctggtttgtctccttattctcaccacccccgccccaggggggattctccccctgtatctcccaactcagagaagcctgggttcaactcctgtgaaacccgatctccctgagtctcatctgtgaaatgggctgaaaggtgggagagtcacgaggcattttattctcattctcaggctggaaaatgaagtatgaaagtaatagtatctgttaacatttattgagtacctactgtatgcagggagcaaacagtttacatgcattgccctagtcattgttgtaacatctccatgggccatgtttaattgtgtgcccattttacagatggagaaatcagtcacacaggctgatgatagatttgcagcctaaactgctggagactagggaagatagcgtgtgttgaagatgtgggtttaagtgagagtttgctggaagaagaaaggcaaggggacttgggaagttgcctgatggaggagaaagagcactggaccaggagcatttgggacaagatggggagtggccttgaatgccaggcttggaatcctcagtgtttccctggttatgatccagccctgggccctgaagtggatcctgggagtggagagggtgcgtggagagagcctgggaagggccccttcctctccatccacgctggtctccctccttcctgccccccagcctgacacattcccacctcttccaagcctttgccccccagtcccccaggatacacgcttaacaaataaagaagcaggaaaccaaggaccagagaggtgaaatggcctcttctcttgcccccagttctgaggagtggaggagcctggcagcaggaggccaggctcactcaacagccaggaaggggaagtagagctttttataactggggataattaattggttgttgtctgtgactcattactctaatactgccaattaaggacttggtaggacagaagactgttctcaggccatccccacagggtcccctgaagactgtgtctgcaaaaggcagtgtcaaaaccagcttctctatagagagggatataggtcagatgcctggaggaacttcccagccagagacattgaaagagacagactaccatagccgattcttgcacttctgtagtacatttaccttttgaaggctgctataatcttaattgatttcctccaggaagagcaagggagttattcaggccaaggggctgagggcacagcctgcactgaccccactcacacccccaggcctgtgccttctcatctgttccacaccaaacagtcttgtctggggtgccctgattacttattcaatcaacaaacctgtcctgctacctgctctggggtcataagtatatcagacctggttttcccctcccttgaagggccggcccccaggcttgtgggggaacagacaagatcagacacacctggaccacccaggtcgatcattttggaggcctggggaaaccctgggggcagggaaggcttgcccgagctggcctctgggagtatcggccccatctccacagaccagggaagtgttcagggtagggggaactgtgtgcacaagagagtgtcttgtgttcaggaactgaaaggaattcagtccaccggctcaggtgcagggacggggaagggtgctgctcagtgggcctgagcctgaagctgtattaaggagtctaggcttcatcctgggcagcgggggcctgagccaggctcgggctgtgtgaggaacactgtggtcaaattgtggaggatgctgagggccctcaggtggaggtgggagggccagtgaggcctcaggtgtctatgtggggagtgaggaggtatacacagggatgcaggctggggaggcattccagagacacctagaaggtatcaacggactggctgtggactgaggtgcagaggaaggagtgtctgacagtgaatcccatcctcccatcctcccatgatgcccagcgtgggtggatggaggcccatcctggagatgggaacacatgctgtgccccaggagcgagtgagagtacagcgttctcagtagagtccaggaatagcacaggaagggtgggcagaacagacaaataagcctccctaaccccagttgcctgccttctatgatgagatatgatgagagccccccatcaccctaccctggcaggaagacactcggtgtagggaaatccatccccagctcctctgccccttcccctccatgctcgtccacgccagccaccctgagcttctccgcatccacaggataacctcacccttcacagcactgggcctttgctcctgccattccctctgcttggaatgccctgtctttctcctccctgccccttaagactcattgcaaatccccctccatgcccccaacttctgccaaaaaatagccctcctccttcctttctctcctcactgctctctctccccaccttcctcactcccctggggttccacagcaggttgacctgtgctggccatgtggattgtgattttttgtttcccactggactctttaggatagcgtctgggcctgcacactccagggacctgactcagaggaggtcctcggacaagatttactgaatgaacaactggaaggaggattgagcatatgtgttcatgagtgagtgaggaagcggttaggggatgtgactgccatcttgctgaccaggtggggcagccggacccctaatgagctgtcagagaatgtaggcgtacatgtgcggacgggtgtgtgctgtgttcttggtgctgcctcctgtgctcctggtggtggttggcagtggagggtgctgcctcagccagagggacctcccagatcaccctgggagctgggattgggctctgccagtgcacaagagggaggaagagatgagtttcccagctggcccccactttttgtcctgtcagccatgtggatttgtgtccaggatatggagctggaaagaatggatcccactcaggaaatcagggcaggcttcagggatgaagcagccttgagatgggctccagggtgtggctggattgagccagatgccactgggcattcctggcaagggagctgcagcctgaacttgaccctgcctcccagtgactgagtgtgtgatctcaggtcaggcccagaccctctctgggcctgagcttgcttgtgggttaagtggaggtacacatctatgtcctacagatacaattagatcatggataggaatgtgcctcctgtcttgtaccaaagagaccattgttccaaccctgcagaaaacgtgccctccctacaaactttcaaagtgatggctttctctccttcagcgctttgaggaaaagagacccggcaggggtgagagagaggccctctgagctttatttttcccacttctaaaactgcaggattcctataaggataagaaactaggagatgatattattacatccacaagagagagagaggaggggctggtttgttgcagcatgaggaggtggggatttatcgctgcaataaagccatgctgtctcttgccttaggaaacccccacaccctgcctagctcctcttggaatagcaccaagggcacctggcatgaccacgtcacgctccaggggaagtggctaagtcttgttgatgacactctatgaacaccttgagcaagggtggggcaggagatggggcattaccaggggactatcaccacccaccctgtgacgtggtcagggtcctatgtagggatctgggatggttcttcctaagggcccctcagcccttctgctcatgtctccccaaggggctgatgccagccaagggataggctgggagagacagggtgccccaggcaggacttaattgcattctcctgcctaatgaaccactctgagtgcaatgcaccccagcagaagcaaggacagaggcctgattgcccagctctctgtagtccagaaaaataaatccagcctcttaggctgtcaggagccggctgggggtggggattctaatccctttccctgctcggccctaatgctgcaatatctcttcaacctccccaggccaccacctcccccaaatctcccggatcagggccagggtaatcctgccatagcctgcccatctctcccttttgggagctccctgcaccctttccagctgacatttcccaggctttcccgtgcatcagtcccctcatttggaacttggtgaaggtggaacaggctgaccattggaagagctgaggtgcccaagatttggcttgcaggtggcagattcaggagtaggcactcttcagtctctccctcttggtctctgtaggaccgtgtgctgagggtgcagctgggctctgggacctcaaagaagagctggaaccactggggagagggcttggctgagcagaaaggagctgtgccaggcagagcccgcacaagggggaaagggctgccttgggccaggttggaaaacctggaaacacaaccacaggcatctgagaactcactgtgtggtgaacaaatgtagaaattactaccagtatcacaaatgatgtagggacagctgaagcatccatttggtgaaagtaaaattagatccctgccttttacttcacaccaaaataaattccagatggattaagatgtatttttttctatttttaaaatttttttcccattttgaaggcatacatttgttgaaaaaatttaaacaacttggaaagatgtaaaagaaattctagtcttcatgctttagagataaggcttttaaacctctctccgcacacgtgacatccatatggaactatatatagatggatgtcgatggatgggtggattgcagattgaaatgtaagcaatgaagccgagaaatcgtgggtgtaaaatattacttaaatatatgatattgggccacccttcttaaatccaataccaaaggcaaaatgtataaaggaaaagagggatagatttgactacataaaaatttaaatttctgcacagaaagcatgataaataaaattaattcaaatgatatataagaaaaaatatacagtgtgtacgaaggctaattctcttacataaggaaagcttttataagcccataaagagccagttccccaaaataaagcctgctttgctctgtgccttcacgccctctgctccttttctctgtctggcttgaggtttcccaaccttgttctctcaataagtcctttccttccactttgctgcaggtgtcttctcctccaggaaggcttctagctcacccctcctcctataactgacaatgttaaggatccgggctctgagctcctaagcaacctgtgtttgccctgctcaccacaccaattcccaggagtggagctatttgctgccagtcttggctcagggtggcctgatttatctctgagtgtctaagggctcaacacgtgtacgtagatgactggaagagaagggtggtgaggatgtagaggagagacacagatttagtttggtacggggtgtgaggcaggggtctaattacagttgttaccaaatatccagatgtcccaacaccataagttgaattccccatcatttttccactaatatgctaatgtcctaatctcttgcccacatttccaggccattctccttctttagatcgaagtatcaccacttcttagttggatctttaggagatgaggcgagataatctctggcatcttagttaactctgaaatcccagggtccctgctctggcgcagcctgtgactcaaagtgtgaccttgggcaaggccctgtccctctgagcctgtttccaccttggtcagacaaggataatttacatttcctgctccttgttgccccgagacagctggggacactggaggtacacagacctggttgtgaattgtggttccaccattatgtgtgccctttgtgactttgggcaagtcccttccttcctctgtgacttggtctcctctgctttgcagaactgtggggatgatgagatggagcaagtaaagggctcttaggattaccatccccacccacccccaatgccatggtgagctcacacaggactctgttccccacagcccgggatgcagcctgtgagtgagattgggcagctaccatgccagggtcttcttcctctattggtgctggttcccagggccacagcctacagagccaggcctggcctctgcatctggctgaccatggcacccgccctgggttgggggaaggcaatcaacctggctgtcctcagcagctggagagatgtggtgtagagcagggaggaaaggtttgatcactgtcttcacataattaaagggctgtcagacgcgaaatgataattacaggaacgatcctggatttggcgacttacagcttacatctgtaatcgtgctggggcctggcagtcctcctgtgaggtggtggtgatgtcattctgtgaacagaggaggaagctgaggtcagaggtcctgagcgattggcctacagccacacagccggtgggaaaagggcctgggtgaaaatccagctcttttgtgtattctccactctgtggtcatttgaccccaatatttcttaccctttggctggccttgttctgtgtggtatcagagaaccagctgcaggggagcagtggaggaggcagatttcagctccacctcccggggggggggcgtcgggggagggcagtaactcccctgcctggaaggtcagcctcaccagatgccgtgcatgggaggttttagtggtctgggcagcatgccgatactgtccccattttacagagcaggaagctggggcacagagaaggtaaatgtcttccccaaggtcactcagtcgtggccagtctgggattcaaacccagtattgccagactccctcaacccagccttccgttgtcaggctccatgtcttggaaggaagaattttgagtccacagaaggactaggcagcatctggaaggagaagccccttcccaggagccagtggagtagagtagggtgagctcgtgtcctggaggctgcagacacgctcgctgcctcagggcaaggggacaggcaggggagctctgcgattctgaaattctgtaacattcagagtgatgtgtgcagacttcagaccccatgttctgttaagggaccaaggggaggtgctccataaccttcaggatccctagtagtgggaggggcagctgtgtgcattttggcctggggctgcagtctacagtggcaggggcctgtagccagtggcaaaaggcagcagcagagccatcccaccccagcggccatgcccatgcttcctgtgtggggctgggtttgcggctgcagtcgtgctctgtgactgtatgagcccccgctgctaatgaggtctttctctatgttcttctctgaacacagagggctctggggtgggaggaacaggacagagacaaagaagggtgaagagaagacatgaccatcctcaggagacagtgaggagaaggactggccttcagggaaattgacccacaattgcccagattgctacggaggggctcctgtttctggagggttagggtaataatggaaggagatgcagtggcctctgggttggagcctccaggattctccatcacagcagcccccacctcagcctccatcccctcgggcaggaatcagcatcctaccccatccacagccaggggccactcctgccccagctgctcgccctgtctggtccctccttaggcagtctccagcacactcctcctggtgcctaccccaggagccagctgctccctcagccccagcccactcagcttttctcctgctccctgagggtaagtctggggcttgcacgatggccctgcccactggtggccctgagcacccctctgttgccctgtctcacatccatacctccttctatccctcacgccataggtgaccaccaccttgtgcccggcgtgatgctgggcccaggagacatagagacagctcaggccatccctgccctgagggagctcgcagcccagtgagccaccctcattatgcgcccactgtgtgccacttgaagcccttcagctcatttaacagcctccctccgagggaagggctgttattcccatttacaacgaggagaccgaggctcagaggggccaagtgacgtgctgagtggcagagccagctctttagagcccgtgctctttccatctccacaattacaatttgattgagggtcacagtggtgggtgccaagagtctgtgcaggatggtcagggaggggagaccttttgagccctggagggatggaaaggcttcctgaaggagcatcaggtctggcctaggggtcagagagttggaggagagaaatccagggaactaggctgggcctgggatcgccatactgggtcccagagggcaaggtgggttttgaggggagctgttcaggctgcctcccaagggggcctgcagagtccagtcagtatgcctgggttcaaatcttatccccactcctcccctacctgctgacccctctgactcccctccactcacccgtgttgagcctttatgcaaattagcaaaaagcacccattttctaggacacacccgcccgccatgtgccagcaaatcgtcataatatgcacattgatggtcaccatgatgtgagtggcacttcttagggggcagtgcacaacttgctcagccatatgtggtggcccttctctgagcttctgtgcaatgggggtagatacccctaaataaacaacccctagtgttatgcagactgtgagagatgaaggagggccgtggccggggcattgaggcagcgatcactgctccacgtctctgggagcagggccagattggcttgctaatgggtggagcgggcaggcctctctctgctgtaatgtgccctgacaaggaccattagtgctattggggcctctttatcagtggagctgctccccaggccacttcctctggctacttcctcaccttccccttcccttccttccagtccctgccattcagtgttttcctctgattgttcttagagtgacccccgctgcctgcctccctctgtgctggggcctcttcatccccatctacaggctcactgtggcctccggcttcagctcccagggctttaatccctaggttgccccaaccccagctcatgcactagttctgatcatggggttcctggctccttgttgcttaggccctgcctgcattccttccatgcctggatgcctcacccccaaccaccaccagctctggtcttggctggttcccaggagtgggaggtgcagcccctcattcctgccctgccttgctccactgtaaggatctggacacttgaggacaatggcctttagggcataggaccctggctgccatgggccctcccggcccctgtggtcttcctggccccctgtcagccttgcccctgggccctgcatcaccccggtcacaggtcgtcttcccagcgcctacaggaggtgctttaccttcccgcctccaggctacttgcctgggaccagacccatcctaggccgaggctcacccctcgcctaggtccctctcagaaccttctctgctggtcagaggcacacaggccttgcccctgaggaggcaaagtggtctctgtggacagacagccatctaacactgccagcgtgggctctatagaagactaggtacttttttgtgggaactgggtgttaagcctcaggggaatctctcctgggtgggtgtactcatgccagggtaggagaaagggtgtttcctcacctatcatttcattatcaaatcttttcaagttcctgtgccatctggaacacgaaaactgcccagatctcaaggcatttatgtatagcagggagaccgacatgtatagagacagttctagaactgtggggtctgagccataggtgagatggctgcatgggttacggagctctgaggagatgggattcaccctgtgagacaggggagtcttcagggaggaggcactctggaaggagtagtttgcctcatggagcagagaaaggttgctttctagatggaggctccagctgtgtgaaggcttggggtctgaagagcctgtttggggaaccgtatgtaattctgtgcatggggcataaagcacagagctggcctgggccagacagagtgggccctgacatctactgagaagctcttgccagtgggactctcaagctggggtatgacgtgaccagatgggtgtcagtctaaagacatggttcaccctttgggagactcagatgtttaagctggcctgggactcaccagctgcactctgcagggaatgaaggctgttatgagcaaataagaatttgaggtggcaagacggattctgagaaggactagtcctggggtgctggctggagggtggtggagagacggtcatgtgcagacccagactgcctccatgggaggcaggactgagtctagggactcagccattctctgggtggcagctcctagggttcgattgctctagaagggcacatgtcctgccctgctcctagccagggtttccctattcctgaccaaggctgggctttgctgtgcctggaactggagcttgtgccattctgtgtccagctggggcagacacaagtggcctactctctgagaagccaccacctccccaagcctaaacctgctagaaatactgggcctcagggtgtcgtcacctttgcatctctgtttatgtacgaagtgaggctaagcaaggcagtcgggctctgcacatgacaaggagtggtggcagctgctcacccaaacatgagtcgcccaactgaagtgacccacctgggacaggagggtcacccaggcaccagccctcttgcccagggcgaggcacggagcaggcccttagtgggtatggagtcatggaccattagggtgtgaaggcctttcctacgttctggagaggcagaggatgtcacagatacactggtagtgtgctgagtgctcaccaagccacctgacttgtattatctcatttaattctccatcaaccccatggcataagtactagtattgccctcatttcatagaggtgaaaactgagtcacagaaagaatgagtactttgcccagagttacacagcttgtaagtggtgacagggatctgaggttcctgggcagactgatggtatctttgcatggtgtgggatggaaggattctggacagtgagaagactttccctccttcctgcccaatcctgcatgtggtcataaagtactagtagagtggaagtcggctcagtctctgtccttgcagaacccacacttgtctgggggacacagtgagcaggtcatggtgtgcagagcgtgagtttagacagagggatgccaatgctgcgggcgcaccgcggcaggcacgagggtagcagggtgaatccagggaggcttcacagaagcagtgatatttgagctgacttgaaaggtgagtgggaatgttcagggaacaagcccagaggcagtggcccttccaggttgcaggaactggttgtgtaggtcgaagctggagaggtcagggggccacactcctgcttggctatcagtaaggagccatgaagaggttaaactgggatggtttagaaacatagcagggagctcagacgtagggctgcctctgtgactttacaccctcaagggaaatgtagtcttggttcttcctcacactgacctcccctcaagggctgttgacttgttctgatgatctcagcagtttcccgggatgcaggatattccaagctttttgtgcttccaagataaggggacggatgaaagcagggagaaattggagggccaggaggaagtgcctgcagacgcctgagctggcccctcaggaaacagcagtggtggtgtcagtgtcccccgccaccccacttccacctggctggagacaggggtatctggcccagtggaggcagcagaacatggcacttctgtacttcttccttaatcctctgctaacttgctgtgtgacctgggcaagtcacttggcctctctgggcctcagtgtttttctcggtagcacggggtagaggtggagaagaagagtgcctgctttgtaggcatgtgtgtgagggatgtgacttcacagactgccgatcactgtgccagcgccaagggagccgtccccagaatagggagagcagtacacgatggaaaggctgcagaccacagtaaaaagagcacagccccagggggggaggccctgactgcccctggctctccacctttctgtgactttgggcttggtgatggtggacaggtcacttcccctctctgaacctcagtttctcccagggtaaagagggcaggaattcctgcctggcaggtttggctacaaagtgggagggaggaggacacattctggtgggaggcagcctaaggggctggcccctgacccacttaatcccctcctcctctgctcttccagtgggagcgcctctggttcctgctcctcaccttcacctttggcctcacgctcacctggctttacttctggtgggaagtccacaatgactatgatgaattcaactggtgagtaggggcagtgggtgggggaggaaggggcccagagctgggtatccagtagctgggacctgggggctggagttagagcctgtctcccaggttggccctctgagctctgccaccagctctctgtgtggccctgggcagggcctactccctgggagcctctgtcctgctcacctccagggctttggtgaggaggctggtgtgggactatagtgggaagtgccagaggtatgggtgaggattgtatcgcagactggcaagaaagaggaggaggaaacagagagatccatgccccgaggggagtcctactgcgaactcagggaaagcttcctggaggaggaggcatgggaactgggccttaaagaatgactgggattgaaacctggggaactttagctgctggtcttggagaccccttggtgcttgcattgatgattcagcctgcattcctggcctcctgaagaggtggaggggagcctcaaagaacaaaggcttacaggagccaaagcccactggggagacacagggcattccttcccggtgctgtgaccatggacaataggaacataaggctgggccagggctcaaccggggcagggccctttggttaccccctttgtatacaagaaatctacagctcagagagaccaaggtctctgcagaggagatagccctggatcctaggcctcctaactcccttagctaggccctgggcagggctggcagatgagtttggggacagctcaaggtcctttgtgggtacctcagatccaaaggcagggccgtctgagccacttacctgggtacaggaggggcacctgttttttcctcttcgccattccatcgcctgccttttgctaagcagtggagaggtcatgggaggagggcaaggacccagggttctactgacagataaggaaacaggcccaggtcacacagccagttggggacagctggggcttggaagcctggctcctcactccccatccattgctgttccttccttttgatcagatgttcaggtcagcatggcgatgagcaagtctctggtgctctctaagcctctccttctgtaaaatggggtaactctgacctcatcaggtctttctgaggatgaactgagatgatggacacaacagggctcaaagctctacctaaacatgagggctgcttcctaggagaccacatctctagccggaaggcagcatgatgttagcatttgggattttcaggaccctgggcttctgacaggctgtggtgttaggattctgtgatgatcctgggactctgctcatggagctgggtgtccacttttccccgtatggcaccaggctgtgcctctcttattaatgagcacaatcaagaatatgctgcggtcccacccctgccctgcggcagccaagcaagatgagccggagccctggcagagtcccagaggtggcctctggcctttattaaatgccataaatcaattattcatctttgcagatgtccaaagcatgggcactgtcatgagtaaatgggaacgttccctactggccctcaactgcagacccagacagttcctcggaactggagtctgctgcctagaagatcatcaagtctacccccatcatgtacagatggggaaatggaggcccagagagggtgaagactcattcatggtcacacaaccagttagtgccaaaaacatgaattgaggacagactgaagagaccaaggcttagagaggttaagtagcctttccagcgtcacacagcaagaagcagacagatctgggaccgggacttcagcctgcctgactgtgtcatgtccatggagctacccactctacccagagagtgagctccctgtcactgggagtttcaagcagaggatgggttcccgccctgttggggtggtggcaaggggaggcctgcctggcacttagggatgcctggagacctgcagctccttcagcctgtcgcctcagtttcttggagtcagtgctggggttcaggatgccccggcccagtcctgatagtctcaagagtctctggggaccgggcacaatgactcatgcctgtaatctcagcacgttgggaggccaaggcgggcagatcatgtgagtccaggtgttcaagaccagcctggacaacatgaaaaaaccccatctctacaaaaactacaaaaaattagccaggtgtggtggcatatgcctgtggtcccagctactcgggaggctgaggtgggaagattgcttgagcctgggaggtggaggttgcagtgcagtgagccgagatcacattttaccccattctgtaaaatggggtaactctaacctcatcaggtctttctgaggatgcaatgagatgatgaacataagagggctcaaagctctacctaaacatgagggttgcttcctgggagaccacatctctagctgggagaccactgcactccaggctgggcaacagagtgagactctgtctcaaaaaaaaaagaatctctgggaataattcaattcatacagtaagaggatgtgagtgacagccagggatcagcactggatgaggagggccagggagggccgtcttggctgttgctgtcctcaaggactccctgctaaaagtggtcacacttgagagacaaatggaaccagaacatctttcaggaatagttatcaggagcaagtcttgcccctcttcaggcctcagtttcccaacggtatggtaaggtgagtgcattcagtgatctgccaggcagtagattttcccctggactctgaggatgagggccagggagggcagatgccccatgggttcctcccggtgtcccttcccagctgtctggcaaggtcccagatgacagcaggctgaagctgcccagcgctcagattttctgatgaccttgaacaagttgctgcctcttttgagcctcagtttccccctttgtacaaggaggatgtgagtagttcattcttttttttttttttttttgagacagtctcgctctgtcacccaggctggagtgcagtggtatgatctcagctcactgcaagctccgcctcccaggttcacgccattctcctgcctcagcctcccaagtagctggaactacaggtgtctgccaccactcctggctaattttttgtatttttagtagagacggggtttcaccgtggtcttgatctcctgacctcgtgatctgcccgcctcagcctcccaaagtgctgggattacaggcgtgagccaccgcgcccagccggatgtgggtagttcattctttctggagagcatctaagcagtatctatcatgccccttaaaaatttcaatcccaccagccacagtggtatgtgcctatagtcccaggtactggggaggctgagatgggaggattgcttgagcccaggaattcaagttcaccctgggcaacatagcaagaccctgtctcaaaaaaaaaaaaaaaaaattcattctctttgaccctataattgtatctgtaggaatctatcctaaggaagtaatcaaaaatacagaaagatatgtataaaaatttcatttttatgttaatttataattgtgaagaattagaaactatttcatgccactagtaggaagctggctacatatggtacattaattcagtggaaaaccacgtggctattttaaaaatcacattttctcaggatttttactggcataagtaaatgcttgtgttgagaagacagttggccaggtgtggtggctcacgcctataatcccagcactttgggaggctgaggtaggaggatcacctgagctcaggagtttgagatcagcctgggaaacatggcaagaccctgcctctacaaaaaatacaaaaaaaattagcccgatattttggtgggtgcctatggtcccagctgaggtaggaggattgcttgagcccaggaggtcaaagcttcagtgagccatgttcgcatccctgcactccagcctcagtgacagagaccctgtctcaaacaaacaaacaaaaacaaagagagtttattgagtagttaccatgcatctcacctcacttcatcctcatgagaccccatgaaaggcactttttatttatttattttatttatttatttatttatttatttttgagacagagtctcacactgtcgcccaggctggagtgtagtactgcgatctctgctcattgcaagctctgcctcccaggttcaccccattctcctgcctcggcctcccgagtagctgggactacagacgcctgccacaacgcccggctaattttttgtatttttagtagagatggggtttcaccatgttagccaggatggtctcgatctcctgacctcgtgatccgcccgcctcagcctcccaagtgctgggattacaggcgtgagccaccacacctggcttcaaaaggcactttcttatccccatcctataggtgaggaaactaaggctcagagaagtcaagtattacattcgatcaattctaagacccccaattttcacatcttaacattgaagttgagatgacagtgacaatcgatggcatcttagaatcagtgaagcctgtcctccacaaggtcctacaagacagtgaaaagcagagacgagaggggatgtgaatccagcctgtgtgcctcactccaaagcctgtgctcctgaccgtgttgctttgtgcagcggggtcctggctttgctgtttatacaaacatataggcatgggggcgggggaacccacaggaggaagatccagcacagccttggtaatgattacttctggccaataggattatggggcattattttctcctttacatttcttggtccccgggtggctgccatgagcaggcatggtagagcatcaggcagacgctgagccttattgctaggtgggcacagcctggtcactgagcccagcctgtcgtctgtgtggaggctcagaccatcctgattcctgggccaggtagtggcctggtggaggtctgacccctgccccctctcctcctggcaggtacctctacaaccgcatgggctactggagcgactggcccgtacccatccttgtgaccacagctgctgccttcgcatacatcgctggcctcctggtacatggggctgttttggagggcaggtggccctgctcccaggggaagggatactggccctgtgctgggctgatggagggtcccaccctggtataaaggggaaagctgtatttgtaggaatattgtatttgtaggaatgtatcctaaggaagtaatcaaaaatacagaaagatatgtataacattttcatttttatcttaatttataatagcgactaatcagaagctatttcatgccactagtaggaagttggctacatatggcacattaattcagattttgcccagggcctctcgggctgctgcacctgaggcctgggtcccccaaagcaggaggtcctcttgcttttgcccgtctctctaggctgccccttcctggaatgtttgccccggacccagtgagagctgtcctggccgagagggcccactgcaggcttcctcttccaggagcctctgcttcaggctcttgctcccgatattccactcactgagatgcaggtggatcccccatgctggactgggggctccttggggacaggctcaagtctgtttcagaatcccggggactggaactcccaaaatgtttgatgaatgaagttgagtagtccaagtacagcagcacccagtgacctcttgacggggaatcacacagaggaagagcctagaggcctggaatcatctgggaggaggccaggctcaggctggctagtctgggctgggctggggagggcagcgcattcccatcgcctggagggaggttcgctgcctctgcccagggtcaggcccagagccgcagtggggagcagggtgtctgagaaactggcaaagccttcccgcccacacgggcctgacaatcaccctgtgggtccctcctcaggtcctggcactatgtcacattgccgtggggcagcagatgaacctgcactggctgcacaaggtaagggccgcctcggccggggctgggagagagcaagggaagctggaggcagcagcagcagaggaagggcctggccaccatgtccctcccctggatcaccgttagaattgttctcatagctaaggctgagcactcactatgcgccaagcacttttctcacaacctcacccgtcttcattcacttaacccttacagcaaccttgtgatgtaggtactgttatcattccattttgtggttggggaaactgaagtacaaagaggttaagtgatttgcctaaggtctcccagtttaaacatggaagatccagggtcccgcagtcatgtgattaaccagcagagctcacagctcatactgtggcacccaccctctgggggccctgcctcgggtctcacctgcctcttccttctttggtgagctcttttgaaaaccctgatctggcgatggcattccccaacttaaagcctttccaccactcccaccgctcccaggatgacccaaacttccctacctggcatgatctggcccctgctgatctcccaacccatcatgggacagtcaccctcagcttctgctacatgagacatctcatgctctcccagcatgtctgcctccttcccccgtttagcactttgctcttgccctccctttttctctcggaccccttcctcagtacctcccctacatacacaggattctctcccgggacttcctcagcccctgcagcctcccctgctacatgtctgaacagctatgtttttgtgttttcagtattcgtctggctccctgaccccgacccacccagtcaaggtgctctttgcaggccagagttaacctccatctccctgttcccagtgccccccctcagggctgggcccaaagcagacaggcttcacccattccggagccttaactctctgccttacgtccattgcaggcatagtgctgaagtgtgtttctgatgcctggccttcttggggccctggtgggcacagagtggtaccgagctgaccaaggcagagcccctccctcccaggaacatctggatcgtctccctttccccagagcctggctccccgtgggcctgccatttaggaaagggcagaaatgttcagaaactaccatgagcccatgagatggggccagaatgactccaaggggaggggctcacttctagctagaagacggatgtggaataggaaaggaagaggggacagcatgagcctgggttgggctgtgtggagtgggaggtgcctgtgagcatccagggaggcaccgaggccggtttgttacatgggcctggagcttgggagtcagaccccagagactgaagtcttagagtggtaggagccgtgagcagcccctggtccccccaccttcctcctgccctcactctactcacaggcctcctctgggcttccactatcccctctgtgagggagtttcttctcctggctgcaaagctggcatttgaaagaactgcaccagctggcaccccgggtggggctggcacatgctgtggtcaccttctggggccatgcctggctctcagcaggtaaggtcacacatgcttgattctagtggagaggcctatagagccgctgagccagctggagctggcagatcaatgcaaggaagcagatcccattgtccatgctggtgccagctcccagggtgccttcctctgccctctgccccctatgtgagatcgcagcatgagcagggtcctttcaggtggagctgacccagagctcgacccgccccaccaggagggagttccccagagctcagagtgttccagcagggcctggaaattctcttctgtttctaagattctgccatttgattctaaaattctaaggactctttattcttttttgtttgctttaattaacttttgaccatgtaatacatcgacatgattcaaaatacaaaaagcacaaaaaagtatacaaagaaagtctcctcactatctttccagacagattttaagcacatgcacatgtacatatgcatttcctttttcttttttctttaaacacaaacagtcgcctactccaccctctgttccgcaccttaacagaattcttggagctccttcttcgctgcattaaagcatccctgttggtatccatcccttgctcctgctccctggtctggatattccctgattccctaggcgtctagccagttccctgttgatagaccggatcgacatcccagctgctttctgtcttttgccaggacgatgtggtggtgacctgggagaggaatttctgggtgaagaatgtgtactttcatcattttgatcttgccaaatggcctccttgccaagtgcctccgattcatgctctcttagcaatggatagttgttctataaaaacacccttgcccataaagcatcagctgatttattggcttttgtcagcctgatgggtgaaaagtggtaccttgctgtagttttcatttgcatttcccttcgggtgagttagattcggcatttttcacatgtttgagtaacttgtgttttcttttctataaaactgtctcttcatatcttttgccatttttgccattgctttttgcttattcatttgcaggaactctttatagatgtgggaaattagccatttggctaacaaactgcaaataattcttcctagtttgtcattcatccttggactttgctcattgcgtttttaccatggggatatatatttttttattcttacatacttgaatctgtcatctcttgatgactccttggttttgtgtcagactcagaaaggtctttcccactccaagattataaaaatttttctatggtgtcacttggtaattatatatttccacgtttttaacatttaattttttctctttttggaagctattttggggtatagtgtgatcttactctgttctttttagatggcttcccaacgtttccaactctctctactgagaatttgtcctttattcatttgagatgctatttttatcatatactaaattttctttatgtatttggatctatttatgaattttttgcttattttcatttatctatctggtcttacatcagcaacatagcactctaaagaccacagttttatagtatgtttgtatttttttttttttttttagagacagtcttgctgtgtcgcccaggctggagtgcagtggcacgatcttggctcactgcaagctccacctcctgggttcaccccattctcctgcctcagcctcccgagtagctgggactacaggcaccggccaccagcccagctaatttttttgtatttttagtagagacgaggtttcaccgtgttagctagggtggtcttgatctcctgacctcgtgatccgcccacctcggcctcccaaagtgctgggactacaggcatgatccaccatgcctggcctatagtatgttttaatcatgaagtttgagagtctctggttcccctgggtcctgaggaggggaggacagagatgctcaggacagggtgagagggagccattcacagcaggctgggtgctgagtagatctggtgcttatgtggggaccttcctcctcctccccagtctgccaaaatctcctgtttcccagaaatctctcccaggtgagtgttcaggagaaattgaggtacccaggaggtgagggagcaggctgaagggttcttgggagctttacagtaaacaggaggccctttccctgagatgccccccttcctgccccacccaccgccctctgtgaggtgttttggtcacagctcacacctccccaggctgccctgagcacactgcactgctcttctgtcctcgcctgactcccctgcctcagtggcagcagcccccagcccaggacctgcacagaggaggcgtctgtcagcgacccaacctgagccccagagaggagcactgggtaccacacagccccaaggcaagttactggctgggctggggctggggcttctgcctcctaccaaggctccatcagcctctacctgccatctgctatgtctacttcatcacctctcctggtgaattcagacttctctccatgcactggccccagctttatggtttttcctggtgtccagcctctgtccctccagcagcagcttaaggaaggcgcattcactgagcacctcctgtgtgtgccaggcactgcgttcaccataacagcagtaaccatcctttattgggtgctgaccacatgtgtcaggcacctttcactcagaatttcacagtcatttcactcctcacaataatcctgttcccatatcatgctcactttttaaaatgatatcactgagatttagtaagcattttcttctggccagccgttgtactaagcatttcacttgcatttcctcactgatcttccccaacccccttccaggtaggtactcactatccctatttcacagctctggaaaggtccctggagaggatgtggaaagatccccagtaggtagcagagccaggattcgactgaagaccgtgattcaagtgaggctcttaaccctgggccagctgtctgccatttggactgcaaaacccagaggccagatacccctaagaggccagctgttgcacctctgcaaggcggggttccacctcctctcgggtcccggcacctaggccagactcatcgaatgaatgaaagactctgttgtatcccctgtacccaccatggctatcacaagccacagtcccatgaagacagagaacccaaggccactttctcagaggaggacggtgatctgtctctgggcctctagggtgggattcatccttctcagtcagatttcaggagcgatggtggttgcgtttttgggtgtcagtgctattgctataacttaatgatgcaaggtagggaagtcccacagacactgaacatgcagtgatgctgctgagtgtgttgattagcaccaaagcaactgtggaactcagagataataacatttttaattgtattagggtttggggaatcagttttattgcaagtcgtttccattaataggtattgtgatgagatgctcctggaaaccatccttaactcactgtgtgcagggccacctcccacgatggccacaagggggagctgcgcgccgggggcagccgggagaaggggcctgagtgccgagggcggggttctcaggggttcggaggcgcagctgggcctcccagagactgcgcagcctctctgacaccagcgtgctgtctgtccgagaaagcgcacacccccttaccccctgagatgggcagaaggtgttcgtttctggttctgccccttcaaagctccgtgacccagccagctgttcctctccccgaacctcgcttcccgtgtgtgagatgaggatgctcgtgcctccgcggaaccaacctggggaccacgcgaagcgcccccacaggcccaggcacgcccatgcctcttcccgccccgagcccccatgtcacagcccttccagctcctcacctgcctcgctcaggtctcttgggggaacatttgtttccaggctgatgggctggaatgaaaagcctccaaagggaaacttcatcccaggcgagactcagcattccccgccggcgagtgaaggtccctgggtagggagcggagatgctggccaccgccccaccctcatcgtctagaaatgccactgtccctgctcggcatcagagggccctggccgctgctgcctctgggaaaggttgcctcgggagaaagggggtgaaggccctgccagcagctagaacggctccagggaggcagggcggccggcagtgctgtgggagaaggacaggcctttggagggagatgggagacgagtctggagaaactagggggacggaggtggcggctttgactgacccttccagagactgggatctgcgggaggctttggaggagagccacaacctgggcttcggggaggcacgcctgggggtgtggaggggggtgggtggagtgagatccacggctaggggcgaggggctgggggccgaggagccgaaaacctctgccgagcttcacgtggttaaagatttcaggtcttacctgtcaccagagatctctgtcccgtagaggtgccacctcatcctccatgagagctgtgctttgctttcttctggaggctgcaaggaggatggcccccatcacggcggacctagatgctgggagtccgggagagggcaggccgtggagatggggcaggtggcgatgtgtttcaccacccactcccgcctgaagtgccactgtgagcccagcccagggtgccaggctgggctgcactccaggctcctgcagcagacccagttcctcagcctccttcccctgaggcctgggcatggcctggacaagtgggtttcctcctctgctgtgccatgctgaggtggcagggaggctgggcgggaccttggatgtgactaacctgccaggcccagggaggtcccccttactgaatgtcctccctcctcacagttccctcctcctcctgtccccatcctcccttccatttctcgctgtcccttcctcgctgggtctgccggcctcctgctgcctcctcctgcctcagtctctccctgccgtgtctatctgccggcctctagtttcctggcagcccatgcctgtctctttcctccctcccctctgccctgctccatcggcctctcctgccctctctgtctctccctctggctcctctctcagacacactgggaaccctcccacccgctctgagcctctgtccggtgactcttccccctccagatcgggctggtggtcatcctggcttccacggtggtggccatgtcggccgtggcccagctgtgggaggacgagtgggaggtgctgctgatctccctgcaggtgagtgaggagggtcccccaggaccctcacaacaagagcctttctgtcacttccctttctccagaccaaggcccaaagaagggcagggaggcgcccagggtcacagagcaggtcagaactagggaggacaccagggtcctgaggctcccagtgtccccagttggcagatggagacagggttgcctgcctcataggtagaagtaggaggctggtgacacagggtctgggcagagctgggcgttactggtctcccttccctctccctgcaaacagggcacagcgccattcctgcatgtgggggctgtggcagcagtcaccatgctctcctggatcgtggcaggacagttcgcccgcgcagagcggacctgtgagtagaactgtgaagggcctgcccctccaatccctgcaggtgccaagaccagctggtgctgccccgacctgggctttccctgggggtggcctggggatggggtggggcccctgcactcagtgagggggattctggctcagagtggcccacagagtccacggagggtcacagcttcagtcggcctcacactgtattcctcctccatgtctctctctctgcatgtatgcacctgtgtctgtgtgagttagaggcggggttcatcttcccagcaagaataagggcttccccctagagcacctggatcctgacaggtcgggggtagaggggtccagcattgcaccccaacctgcccagggctcaccaggcagcactcacggccccttatctgcagcctcccaggtgaccattctctgtaccttcttcaccgtggtgtttgccctctacctggcccctctcaccatctcctctccctgcatcatggagaagaaagacctcggccccaagcctgctctcattggccaccgcggggcccccatggtgagtgccacctcagggtcctaacagccccgttggggtggggtgcgatgggggggaccttcttgggaaatggatatatgtaatggtagcaaccatttgtagctttttgaggggaggtacatgggaaggactggcaaaaaggccgggagtgctgggatggaagcacatcttgaagcgtcctgaaggcatcttgctaaaaagatttcagttttgtcctaagtgccctgcaaagatgcaggagggttttaggcccaggctagacccaggtgccagttaggaaggcccaggagatggatgctgagtgtggggcctggggtctgccaccaggcatcaggagaaccctccaggagagctgggaggcagctcagagcccactgtgacagtgagtacggctgaaccgacgtgagttggagaaagacgaagggatcaaagtcagcgccgcattctgccaccagtgcactccatagccctgcaggagagcttcggtgagagggcaggctccagagccatgttgcctgagttagcatcccagcacagctcctcaccagctgtgggaggcccaacagtttccatctctttgcctggttcccccatcttgtaccatgggactagtgagagcacctgctgtggggctatgaggagcaggagttagcatgtgtgcagtgcccaaatatgcacatggtgcacagaaagtaagaggcagacactgctgttaccttgggcagggccatctctctggagcagggtctcctgctccatgaaagccttgaacccaggcttcttagcagaggtagtacacacccccaccctgccaagtgggggtgtgtgtgagcacttcctgagggcttggcttcctggtgttccaggctgttgtgggacctcagggtagtaagggggtctcacataactgctttggaaggaggtgctgggtctgccgggctgccactcactctggaagtctggccccctgcatgtggtgggtattattttctcgataagactccagcccctgagccagactccagtgctgaccccagtccctcccagaggcagccagtggggatctggatctggtgtccagtttggccacatgctgcctgtgcatcttggaggggtcaccagtcccctctgtgcctcaaaggtatggatgcccatgctgctggttattgtgaggaccaattggagcccagccttcccagtgggggcaggggaactcttctgaggggcttaaaacgatggcccctcctgtctccatgactcagattaccatctcctgggctccctccagcagccaggggacataagtggtatgctgaagcaggaaggtggccccagcgaggatggttttctttagtagaaaaaggtcaaatatatgcagaagtggagaaaagcatataatgactcacataatgaagaaggatgtaatgaatccaatcccatacttatctacgtttggccattcttgcttcatctgttccctacttttttttctggggtagtaaagcaaatcttaggcatcgcatcgtcttacccataggcacttcaggatgtatctgtaacacatgaggacttcagaaagatgcatagcaacaatgctgttattacacccagccaatattaaggataatgattccttaatattatctaaaatggaatccatgttcaatttccttttattgtctcgaaaatatctttttacagtttagttgttaaaaatcaggatccaaatgtggtccacagcacgcatctggttggcgtgtctcctgagtgccttttgatttgtaacaatcccccggctgggctcagtggctcatgcttgtaatcccagcactttgggaggccaaggcaggcagatcacctgaggtcaggagttcgagaccagcctgatcaacatggagaaaccccatctctactaaaaatacaacattagctggatgtggtggtacatgcctgtaatcccagctacttgggaggctgagacaggagaattgcttgaatccgggaggcggaggttgcagcgagccgagattgcgccattgcactccagcctgggcaacaagagtgaaattccgtctcaaaaaaaaaaagttccccgtcccttttttcccttaagctgtttatttgtcctgagaaatggagtcatttgtcctgtgggatttttcacattctgcatctgactgatcatgccctggtggtagtttttgaggggctggcaagggtcccctctgtgtgtccctgtgcattgccttggggggctctgactctgggtccacatgtctgtgtgtggtgagcccaagtgcacatctctgtcttggagactgtctgtgtgtccctggatgtgttgttcctatgcagatgtggcctgtccctctgtgcatgtgtgtacgtgtactttaatatttgattgcactaactctgaagctaagactcttttttaatagtactttgagttgctgttttataaatctgggtctcttaaccatagtgtcccacccacctgagtaaccaccacccccctatgcacaccctcctgacaacagaaccccacttggactggcctgaggcaggtgcgagctctgagacggggactaagaattcaccccagcaacgtgtatgcttctggggccttcctggagtcctgagcctggccagggagggccaggtttccatatctctttctccaggaggtcagcacctaacccagagagaacttaactgtgtctaaaagcttccaaaaaagactttccccttcccaaacacttcctctgccctgagggtcttcgcaaccccttccaagcttctgccttctgcagccccagcccatgcagcagggagcgtggacccctgtcaagtggtccctgatggaaggcctggccgcaggatattcagagatgggtgggattccactgagtccttgcctctctctccatgcctttgtagtcctgcttcccctgggagtgcctcacacaacccactggactgggagacaggtaacatgtcctccaagagtgctgtatgccagggacaggagaagaaagaaactcattactgagaccctgctgtgtgccaggtcctgggctagggtctgtgacttttgttatctcacctgtgaggttgataatgttagcccattttacagctaaagaaactgaggccccagctctgtgtctgggaagtgaaattgcacctttttagtccgttccaaagccctcaccactccctggctccccagtgctaggctgtgtcacaaaagaggggagtggctggggaacatcgtggccagagggagagaaggtgggaacaggattgtcttcagtgggaatgaatgagatcagccatgggaatccttcccacctcacctcttcactgacagagcagggcagggggatcgggggtgtcctccctccctccttccctccgaccatccctcatggacctggtcttcgcccaatccttggtttggtgctgacccccagtggcagcaacgggtatgacagtcctcagatgagacccaactagggaggcttgaatcccaactgtcctaagcataaagaccctcatgagtacacatctctaaggggcacatggggaaactgagacccacagagaaatatacccaaagtcaggacaatagttaatggcagagtcaaggctagaaccagagctgggtgtggtggcatgcacctgtagtcccagctatttgggaagttgaagcgggaagattgcttgagcccaggagtttgaggctgttgtgagctgtgattgtgtcactgcactacagcctgggtgacagcaagaccttgtctcttaaaaaaatgctagaaccaggatcatgtaaggggaaaacagttgctatttattaagcacttactgtgtatatcaagcagtgtgctagaggcttttaattcacgtaacagtccagggagggaaataatgctgtcatgtttatatagatgaggaaactggtcccgcactgaaactctaccatcccatctaccctctcttccaggtctcccccctggacttgtctcagggtataacccttggtataaccaagggtataacctgaatttcacattcagccccagcccaagactgccagagagccacagaggactgtaaaaaagccctccagccccagtgtctagctcagtgcctgggatagagcaatgataacatagtgaccatagctaccatgtgtcaagtgctagctacatgtcaggcatttatatgcatcaacactaaccagccctgcctcccccgcccccagtaaaaccaatgaggtaggcatgatttaatagatgaggaagctgaacttcagagaagctgagtgggtgcccagggtcacacagctactctgtggaggggccagaattagaaccaggcctagcccagcctcccaacatgaaagactttccattggctggggagggtacatcagctgaatcttggctctcccttcaccaccccttcttccccagctggctccagagcacacgctcatgtccttccggaaggccctcgagcagaagctgtacgggctccaggctgacattaccatcaggtaggtgtagcggaggggagatagttcctctacccctcccacacgcttcggcatccacctgggtctctgctgggggaacctctggtctcagagcctctgagatgggaggaggaagacttagattatccacagcagggcaggcaccctgttcctgcagactccaggatgtaaaatagaggaaagaacaaatgctcttggtgcaagcaggagcactgccacagagccacttgaagggaaaaatagatgatagagctacaacactctcatgagggaaataaagcaagttgcagagtgatacattcactgtgactccagttacgttttaaaataccacaaaaaagtgacatatacactttctccatgtacatatataagtagatattagtataaatggcaggaagaatccatactaatctcataacagaggttatctgagaagggaagaagggcagaactgtcatatatagttgtacaggttgcatactgaacaagggcatcacataaatgaggacattgttcccagtatagacatagaattgtgtgtttatcacaactttctagcagatggtggtaaaatgccttgaggaacagagggcacaggtaccttttactgtttcacactaaggcaccatatgagctatttgcaaccctggtagagtagacaaggattggggttgggtggaatttgccaaagaggtctacatttgcactgttctcatcatagcatcacagggatttggttccaaactgggttccaccacttacaggctgtggaccttgagctagatacttccctctctcagcctcagtttctccattgtcaaatgaggcagcacctaccttccaaggttgctaagagagtaggtccagatttttcccagccctccctccttggcagtccccacccccatctgaccctcacagagagccagaaggcattggaccttcagggtcacccaccagcccactgtcttccctgtgcagatggggagactgaggcccagagaggggcagagccagccgggatcctgtgctgggtggggaggactgtgtggggtgacgatcattggtgggcaggtaaaggatctggggggtcactgactcggtggccccaccctccctgcagcctggacggcgtgcccttcctcatgcatgacaccaccctgcggcgcaccaccaacgtggaggaggagttcccggagctggcccgcaggcctgcctccatgcttaactggaccaccctgcagagactcaacgctggccagtggttcctgaaggtctggctgcacctgatcccaatcttaggcatggaaaacaccagcagggactgcaaggagtgagaggtgcaagggtggccatcagcttcgagacccccactctcagagctttcgcgacctccacccaagctgcttagtggcctcctaggctcctgccactgctgccagactcatggttgtcactgcttgttctgggtccatttccctcactagaaaaggttgacagggatgagagcagtgaatagaattcttaactctgtaaaactctagagaggggttggctctctgatctgaaatgctctagaaggagaaatgctgtgggtctgggagcgattccaagcaagccgtcctccgtcctcttggtaagcagggtgtggggtagaaaggttagggctggggcctcctacagcctccacatggccacagccatcaatctgcctgaccccagcagactctggcagcccaggggtctccacgcttggttgccagaagggtatgtgggggcccccaaagggctgatgatgcagccatgtgtgtgtccctgtccctgccagactgaccccttctggacagccagctccctgtcaccctccgaccacagagaggcccagaaccagtccatctgcagcctggcagagctcctggagctggccaagggcaatgccacactgctgctcaacctgcgtgacccgccccgggagcacccctaccgcagcagttttatcaacgtgactctggaggccgtgctgcactccggcttcccccagcaccaggtgaggccctgcaacgcagctctgcccccgggagccctggcctggctagagccctgctgctgcatagcctttccctgttgcactccggacttcagctttcccatttgtaaaatggggatcacacactgctcacttccctggcagggtcatcatgggacaagaggggaacaagaaaacactttaaaatgtataaaggtccaggcggtcaagttatttcagtgaagtgttgccctgtcgtttggtgtaataatctgggaccagagaaatctgacatcagtttaggacggcacactaggtgctagtggccatgtgcagagtagtggctgtttgggttttccctcccgtactgacagcaggccagaagcgaagtttcctgagttgctgccagtgcactttgcagccttggctgggactgagtcctgccctgctaatgacttcatctaagctttcaccgcctgccaggtcctgtctcttaaccccacaggtgctctaggaggagtaggtactcttacgcatcgtgcagaagagaagtctgaggctgcctctcttctgcctgcaggtcatgtggctgcctagcaggcagaggcccctggtgcggaaggtggctcccggcttccaacagacatcaggctccaaggaggcagtcgccagcctgcggagaggccacatccagcggctgaacctgcgctacactcaggtgtcccgccaggagctcaggtgcctgccctgccctgggctcctccaggagagggtgggactgagtctctcccagtcctgccaccaccaccccccaacacacacacacacacacacacacacggtcgggcagagggatgggcacacagaggaatcaggcacacatggttcaaagacaagagggtgagcgtgtcgggcagacccgggcttgtcccggagcttggccctctggagccaatgttccttgccccgggcatggctgtgaggtcgtgaacaggacgtgctttaccagccccgacactgggcctggagctgccagggtccgcatgctgacctgcctctcccctgccccacagggactacgcgtcctggaacctgagtgtgaacctctacacagtcaacgcaccgtggctcttctccctgctgtggtgtgcgggggtcccatccgtcacctctgacaactcccacgccctgtcccaggtgccttcccccctctggatcatggtgagttggggggcagagggcccctggggggcagtgctggagctgcctatagcctgccctgaccactcggcaagctctgtgcttggagctgtccctgggaggtctctagcatggtggggagtccatggtgggcgtgcaggcttgaggcatgagggtttcatggcatctgggatctgcactaaggtgctgggaggaccctgggcctcatccacagggagaaaagcatcactaagggctctaaagaagtaaagagctgcttgggtttctttgctttggagggtaacaaggacaggaataggaagcattgaccgggcgtggggctcacgcctataatcccagcattttgggaagcagaggcaggatgatcactggagcccaggggtacaagactaacctgggcaaccctgtctctacaaaaaaaaataataataattaattaatttgctggccaaggtggcacacgcctgtagtcctagctactcggtaggctgaagtgggaggattgcttgagcccagcaggtcaaagctgcagtgagctgtgatcactccagcctggatgacaaagtgagatcctgtctcaaaaaataaaaataaaaaagaataggaaacaattaaaatctgctcagagaacagcaaataaagcaatattttagctggttgactgggcacctgcagataggtggtggctccactgtcaccctgagcatgcagaaggcaggtggagggtatccttatggctgagagaatgcagtgccaatgaatcagacctaagctgtggatggttctatgggagaggagggtgaagggaaggcagcctggggaaagggtcgagaccgatggatgagagtcggcagcggggggcggcaaagccattgtctttcagtatctggctcctgctttgaggaccctagacacacagaccctgcaggcctagcacacaacccctctgccctgagcaccatacagtcccctcctaccctgagagtgcacacgtgtgcacacacacgccccggcccccaggcccacagcgcctggagcctacacctgcaaaatgtcatcttcagcccccagaccctctcagggtcctcccttgcccttccccagtggccatgtggggtcctttggtccacggaccctcagtctggagcctcagtctggactggccatgactggaagttggcctcgggccgtctgtccacagcccccggacgagtactgtctcatgtgggtcactgccgacctggtctccttcaccctcatcgtgggcatcttcgtgctccagaagtgagtaggatctgaccacttccgtggctgtccctaccctgcagcaggcccagcccccaccccagccaggtgaaccctctcctgagccctgggcctcagccaggagcaggcctgaccagggaagaaggacggactccggtggccccatcctccctcagacagaggctgggtgacttctggaatgaacatgcagctgggatcccagagccaagctctgccttgggtggctatgtgggcttaggtgaatttcagctcctcaccgggctggcctgctcatctgttagccagggcatgggttcccaccagccctcagcaagatagctggggtgtgctcgcagtggggaggtgtggttggtcccagggagggtctagggccagcctggggcccccacccagccaggaaccaaggggctgggattttattcttgactgatgttctctctctgtcccatcctgctctgatcggcgcatgtccctcctctctccccctccccctctctctgctgcactctggcatctcacagctatcacttgatcaggtaattctggtgtggtcttcctcctccttctgttcctctttctccctcttgccatcccttctccagttctgtctaaaaacccaccgtgcaccaagccctgtgcccgggccacctcgcagacagcgcgctcgcctgaagcctcccttacccccgcaatcctcttttctgctcctcccgtcccactgccgtgtgtgtccctctgctccctgttcccacggccgtttctgcaggtggggaccagcgtttccttgacagcttcctgacctggcccctctctgcaccaaagtgtctccctgggggaggggaccctgcctgggtacccccatccccctgcctctggcacttacaggggccttcaccacttgcccagggcagaccctaccaagtttctgcctctctcttcccatcttctccctccctggctctgcctctcccactgttcactcttcctgtttacctttctctgcctctcccatctctttctctctcttctttacattctatctctaacacccatccctgctttgctccccgcaacacacagccttttcctcattcccctcagaggaccccacagtggctgagcttcctgttctggatatgcctggccgagagaccctggcctgacactgtccttctgggtttcaacatgaatttccaggatgggacctagagcttagggacccacgtctccctccgtctagtgccttagcccctcctgggtcaggcagcttcaccaatcagcttctaggaggagatgctgtccctggctatgggacattccttgagtcattcctgtgtccgcccagttgaccaacatccacatacactggttgctgatgctgtctgcagcaggagttgggccttctcacatggagccccagggtgctggggaggccaccccatggtgattcagtggctggcacagacacgctgggtctgctcagacacagccagggcagtgtcattgtctcctggggatcaggagaggcctggtggaggaaggtaccctgggggacaaggccgggggaggatactctttccctgtgggccttattcttccattcattcactcaacaagtacaggtcaggctcccgggacacggcaggcactgatggtactggggcacagcgatgaacagagagagatttgctcactgccctcaatgattcatagggcagccagcctcgccagggtgtccgtgccaccccccgcctcctgctttccccttgtctgcctgctctgttcatccatccatccgcctgtccatctgtctgtccacttctgctgcgctgaccccatctagtaactcacagttggtttcttgtggagtcttggctctctccatcccccaagcagggttcagtccctgaggcagttgggttcttgttcccaagttgatcaccccctcctcctggtggggacaggggtgagagtccagtgatccttctgcctagatcccaggaaaggtctaagttcagaggccagggactggggctagttcagaggaatgacaatagtgaagacagtggcctgggctgggcacagaaacctgagtcctttccacttagtgcctggtcccttcatgccctgtgcatgctccacctcccagcccactcttgagtaattttacccccaccttgcacctgtctcagccatcagagggattcatgctctgacctccctccgcattaggactgccaggacagagcagcagttggccccactccaagtcactctaacccccttgccttgggaacctgtgcagaccagctctgggcaaagccccctaccacctggccccacccccctgctttccttccctccctctcaaggggtctccccaatggcttcacttagtctggtcatgatggtggagctataagagacatcagctgggactccctgagattggtgtgtgccccagcttaggtcaacagagtcgtgcctactaagctcctcctgctcccaaatctgtcccattcaaagagagccaggtgcattactggggacacctgagacagaactaaccaaccctagtcctgggccagggctgctgactggcggctctggaggtaagagggaggccagggagccctggccgagagtcagtaggctctgattcaagccccaactctgccctctctgggcctatttccccattgtacagtgggacaagagtcctgctggtctcttgggccacatccagagaggctctggaagtaggcagggtctctgctccaagggagggctgaggagagacctgatgcccacggggccatctctgcaggtggcgcctgggtggcatacggagctacaaccctgagcagatcatgctgagtgctgcggtgcgccggaccagccgggacgtcagcatcatgaaggagaagcttattttctcaggtacacagccctgcagacaggtggaggcaggccctgggcccagctttctgcacccccacatgcaaacagatgtgtatgcacacacattcacatgtggcacatatgggtagggacaagggcacagacgtacataaacccaccgggattatacccacagacatacaaaggcataagtacacgtgtgaaaacacacacccccacacacacagtcatccaccctgtcatccaccatggcttggtgtcagtgccatggttggtgggcaggggtggggtagggagaggagtctgttttgaaggcccatccccctttgcctggttcgtacttggatcctacaatgttggcctcacccttgctctttgccagtccctgtcaacattcccagtctgatggaagcagcagctacgtatataaacagtggcagggaaagtcgagttcctgcgatgggagtgccgggcggggggcgggaggacgtggtcagagctgcctgggcagtgaggaaggctttgggcgcctgatacactgagatggggaggatgcagaggaggtgctttggtaatggcttcaagatgagggccgagtgagctgagggaaggaagggcattccaggtgggcacggcatgtgtgcagaggtggcaagggagcaccgcttgcctgggcaccaagaatgaagtgtccctctatatggccgaactccactcagcagagctttcttgagcctctgctctgtgtccagcactctaccaggccctggggacatagatgcccagaacccaccctggtccttgaggtattttgggggcccaggcagcaaccatacagaatatggccagggcagaaggaagcagggtctggagttgccatgaggaggccctaactcggcccagggctccgatgaggttcccaggaggctgagtgacagatgagaagacttgagccagactgtaggaaaaggaggtgttgttggggcagtcactcctaagagaggggctgacacatgcaaaggccctgaggagagtggacacatgggtgccaagctcaggggcacaggtggttttctgtggctgcagagtcccaggggacagcagatgaaggcgaagctagagtgctcagcagacaccaaaggggccttgagtgccaggctcaatgtcgacctgagcccagtggtttcatcagcctccaagtgccccgctgggtggtgcagccttcctgccccatctgtcacccatcctcacgactgcctcctccccgactcacattctgtctccctctggcccagcagagatcagcgatggtgtagaggtctccgatgtgctctccgtatgttcagacaacagttatgacacatatgccaacagcaccgccacccctgtgggcccccgagggggtggcagccacaccaagaccctcatagagcggagtgggcgttagctgaagacatgtctgtcccacctgtacctgacacagaagctggggagcctaggagagctggtggaagtgtgtctgaactcggagtgctctgggagcgggctccacagcctccttgtgggctccagccccttgtcagccgcagcctctcttgagggggactccctgtctcctgaggcccagctgggccaggactccatcctttcagatgcccctgcaggcctggggctccttctgggaagtatggggcctagggcttggtccccctcttctgaggccctctcctgtatcccgacctggaagctttgatgggtcatgggccatgccataccccctgtggcaatggagtgtgtggatgctcacctgtgccatctgtcctcctgtctgtgccaggaggcacctgagttctctgctgttatcctgccccaagggcctgggccgagcctctacctgaagcaactctgctcttcctgtcagtctcaaagcacaaggaggttcagcccaggaggaagccagctgcaatgtggagacacgtcctcctccccaacccacctcatgccaccgccaaccccctgccccaggagcgggcctgagccacgtcctctaggagcagctggagatggccaaaagagtgagctcaggactactggatcccatgcccaggtgtccagcagacctcaaggcagaagggtcacctaacccaggagtccacagactgatgtgacctcaggttcccacatcagtggccacagggcagggcccacctggtagaagtgttctggatatggccagggtgggtgtgtggctaagtgggcctgaacagagggaacctagggcccttggccaatgtgattaaagctgccatcttga

SEQ ID NO: 242 - DNA, 12493 bp, Homo sapiens
  source 1..12493: mol_type = genomic DNA; note = NC_000001.11:147902795-147915287 GJA8 [organism=Homo sapiens] [GeneID=2703] [chromosome=1]
gccattttgctgctgagcgccaagagagaaagagcacatatttctccgtgggacactccttgtattggcaagttttccttgggtgatattagtttgtaaccttccccccaattgttctttctcagcctaatctaagggccatatataggcttctccaaaaggaaaaaggttgccaataagattcagtcttgggctgggatggctagacttacactccaactctgaaaaccctcttcaagttgacctaagaactggcagaggtttggaagggagaggaatgctggaataatcagcaggatggggaaacagagatgtccaaactcaaactacaatttgacttcttaagctcttttcatgtctacaggaatccacagggacctaaaccaagtatttgatatttatgaaaaagttttgtgcccttttcactcaaattctacaatagaaataatagtcataattactgaatgctgtgggggtagcggaggcttcgtgctcagcattttccatgttggagcatttaatggagcacaggaagggatctggctaaggaccataaaattcctcctaggagcaggttctgttgtctatctatgagaactgctggctagtggctgttctagaaactagaaaagaggcactttccacctggttaccaaccagagtggtaagtggccattgaacgctttggataacttattaatggatgtatatgtgttattctgcctcttcaaaaccagaggagggctatgctgtaatgggcttagatctagaagaccagggctcacagcctagctctgccctcactagctaagcccccatcttggagactcatttcacctcccagcctgtctttttgtctggtaatggggattgataatgccaagttcactggttctcagacatccatctggggatctgtcagttctagctcaagatgaaggtttccacaacctgtgaccaaaatgtgacaatgataaagttaacaatgtagtaaatgtttcaccaagttaagtgtgttcaatttaaaggcttgtcttttattctgaagttatgtcctctccagttttgtggtgttaaaatccccttttatgaaatgatgatgaaaatagactgtagttgtagttagtaatttaataactctttttttttttttttgagacagagtctcgctgtgttgcccaggctggagtgcagtggtgtgatctcagctcactgcagcctccacctcctgggctcaagcaattctcctgccccagcctcccaagtagctgggattacaggtgccccaccaccgtgcccagctaatttttgtatttttagtagagatagggtttcaccctgttggccaggctgatcttgaactcctgacctcaagtgatcctcccacctcggcctcccatagtgctgggattacaggcatgagtcaccacgcccagccaataactcttatttttatgtccttgtttggcaaaataaggagttggtatccttatgttggtcacactagtttgttattattatactagtctgtgaaatctaagtctgagaaccactggcctagttcacagcttgttatgaggactgaaataagatacgtgaaaatgtatcacttagatcaaggatacccaaacataaggtgttattttaatcattacctctagccatcattttctggtgggatgttcctggccatatatggacaccctggggttggaggcttgaactctatccatttattttccatctgtaataggtctgttcactaaattttcacaagcaaaataaaacagagaattatctctgagaaagagaagagaaatagtcttcctttggttcagatttctccctgctcccacagaacgctttgcttctctgatctgacttcctttaaattttcactgttagaagtcaggaaaccaatacatttcccttcgcagctctaaagtgtctctccttaacagcacagtaggcctgtttcaacatcatggggttggaaagattgtgtcctaaattacagtttctctccttcagttatcacaagaaactgtaactagacatttaaaaaaaaatacaatcttagcatggcggcttagagtatagaaagacatgggcttgtttggctttggtttcaaaattactaatgagtggtcaggaacgacttcttgtgtcatgaacatgtatcatgacactcttgtcaagaattgttggccttccagtttatatatttgatctcatacaaaataagcagttttgtgtctcagagcagctggttggggatcaatttactatcctttttgttatttaccattttttacaagttcttaatttttctgctgttagctgtagcaagaggactgaagttccttggtctctagtattcatattacaggaatttggggattgagaatttcagatttcacaaggattactattagaaccatgcactgctgtctatggagctcccactctgtgaagggctttgttctgtgttgtgatggttcacaaaagatgaggccaaaatggttcctgccctccaaaaccttttgatactaaaggggggaaaacaagattggttaacatacaggactgagagcatgtgctcatcacacacattcatgtgggtatgtgagtgaaatacactgtcaaaaatgaactgatatatcaatgagggtaagtattagcaagatagttaagattcagtaagatattagtaagatagtaagatattagctaaatcttatagaagtacagttattcaaattgctgttttaacataaattttagaatgaactatttgataagaaatgaactttttcctggctctgccaccagtgagctttatgcttgggctgcttacctgattgtgatgtttcccacctattttccaaaaggcaatgggaatggctaccactcttaccagggcaattactagacttaactatagtctgaagagttaaaaatagatacatgtggctgggattgagttgctggttccgattccgagctgctgggtccttccccctctccattacccatttctccaaggaactcttcccaatgccagacccatgactggggatgccacagctgctgtcactttttcaggagaagagaagctgctgcaggatgccctgcctgattgggagcttatgaggcctcaagaggaggagcactctctgctctcccacaagaagcgaacagctattgtgcctgccctgacagcacaggctggacattgcagatgcctgcaattagtatcctgccaccaggttctgtctggccagactccaaatcacaggttggaaataggcttttgtgtttaacaaatatcactgtgattaaaaaacaataggcatatccctttagccccataggttcctaggcctatagcatggggcatggctagaagaagcccagagcaagatcctctaacatgggctcttgccctggtctgagggcagtgatgagtaaacttataactctagagatgttcaagctgcaggaacaactgttctccattgaggtggaagttttgctcatcattctttataggttacaggtttgcactggatgaatgacccagttgcagccagccccttgtcagctcaatgccatttccattagccattgctgtgctacaggcattatatactatcatgtttaacgatattttttctatagaccaaatttttgactctattaaaacagccatatgttacagaccctgaaacattttcattccataggacactaaaagtgtcctagaagaccttcctcatcctgtgacatgattccttcccaaagcattctctctgttctttggatttaaaagagtaataataaaaatatacggccctcaatgtgtaaagctattaataagggtttccagatttcaacctagagaagaggaaacataaattaagagcacagaagtcaaagaattgtgtagctttgattgcaggcagtttatctcaatggtgtagtgggaagaacccagcctttgtgatcaagcaaacagaactgctgctatttagctgtctaatcttggacaatatatttagcctctctgagcctcagatttcttttttcttttttttctttttcctttgagacagggtctttctctgttgcccaggatggagtatagtggcacatatcagggttcactgcaacctcgacctcccaggctcaagcaatcttcctggctcagcctcccaagtagctgggaacacaggcatgcaccaccgagcccagctagtttttaaagttttttgtagagatggggtctcactgtgttgcccaggctagtctctatctcctgggctcaagtgattctcttgccctggcctcccaaagttctaggattacaggcatgagccactgtgcctggccttcagttttcttatttgttggaatcaacttagttaacaaatacttatcaagttctcactgtgtgctgggctgtatgtcaggcattgagtatatagctgtaaataagacaggcatggctcctaccgtcatggaaattacagtctagcaggatcaagttaaatgaaataatataatgtcaaagttctttcacaaagttggtattcaataaatgctaatccccttccacttcccttcaaatatacgatcattatatattctgacactcaaacataagatggccacagacaatttcatacatacaagaattgtgttgggagcccagacacccatagtataagggaactcttcagcattatgtctcacgaaacttagatcagtgtgtggtcttgatttaaatccatgtaaccaagggtttctatttatggtcaacaatgaatccttatttttggtggactttaaggaattatacaaatattgcctcattgatgctttcagaccatttgtgaagtgaatgagaataggtattattattattaaacccattttacagatgaggaagcggatggaagcacattcttcggggccttctttgttctctagtcctagtctgcacaaaggaagcactggatagacgctgtgtgcacattgaccgttctggcaacttggaaaggagaggtaccccgcgttagcaaaaacagatattgactcagggttgcattgcggccgctcagctcttgccttctccctcatttcttcaggtgggtgagaaatgggcgactggagtttcctggggaacatcttggaggaggtgaatgagcactccaccgtcatcggcagagtctggctcaccgtgcttttcatcttccggatcctcatccttggcacggccgcagagttcgtgtggggggatgagcaatccgacttcgtgtgcaacacccagcagcctggctgcgagaacgtctgctacgacgaggcctttcccatctcccacattcgcctctgggtgctgcagatcatcttcgtctccaccccgtccctgatgtacgtggggcacgcggtgcactacgtccgcatggaggagaagcgcaaaagccgcgaggcggaggagctgggccagcaggcggggactaacggcggcccggaccagggcagcgtcaagaagagcagcggcagcaaaggcactaagaagttccggctggaggggaccctgctgaggacctacatctgccacatcatcttcaagaccctctttgaagtgggcttcatcgtgggccactacttcctgtacgggttccggatcctgcctctgtaccgctgcagccggtggccctgccccaatgtggtggactgcttcgtgtcccggcccacggagaaaaccatcttcatcctgttcatgttgtctgtggcctctgtgtccctattcctcaacgtgatggagttgggccacctgggcctgaaggggatccggtctgccttgaagaggcctgtagagcagcccctgggggagattcctgagaaatccctccactccattgctgtctcctccatccagaaagccaagggctatcagctcctagaagaagagaaaatcgtttcccactatttccccttgaccgaggttgggatggtggagaccagcccactgcctgccaagcctttcaatcagttcgaggagaagatcagcacaggacccctgggggacttgtcccggggctaccaagagacactgccttcctacgctcaggtgggggcacaagaagtggagggcgaggggccgcctgcagaggagggagccgaacccgaggtgggagagaagaaggaggaagcagagaggctgaccacggaggagcaggagaaggtggccgtgccagagggggagaaagtagagacccccggagtggataaggagggtgaaaaagaagagccgcagtcggagaaggtgtcaaagcaagggctgccagctgagaagacaccttcactctgtccagagctgacaacagatgatgccagacccctgagcaggctaagcaaagccagcagccgagccaggtcagacgatctaaccgtatgaagtgacgccaaagaaaaaaaaaaaaacgcccaagcttacgtagggcaagatgaaaggaacaggtgccaacatgatctgaatcttctgtctcctgtcctcccaccagcctctggttggacaggcactgcagcagggcagtgcactccaggcaactctaggaaacagtctttcccacatccagcataagggctaccaagataaacccatcgacccactaaagttccccagtctcataggactaccccgctcctccaaccccagcagctatgggtgactcttctttcatccccatttctccatagaaacccttaaatcggaattggggttgcctcatagccttttacccatcttgtctcaagctcactaagccagaatctatcatcccagcatttctgaagcagataccatgtgaccatatttcagggatccagactcaaaagcctacagaatacagacaggtgacataagttgcaagacaggcctgttctaatgcaagggagagaatggggctgtgaaagttggaaagcaggggcagctgctgctcacttccagacaatgagtaccatgaagtgttacctggtctttctgatttttcaagggaagccagaaatccaaccttttttttagacaggctctctcttgcccaggctggggtgcagtggcacaatctcagctcactgcagcctcaacctcccaagctcaagtgatcctctcaccttagcctcccaagtagctgggactataggcgcacaccaccacacccggctaatttttgtattttttgtacagatggcgtttcaccatgttgcctaggctgatctcaaactcctgggttcaagtgatccacccacctcagcctcctataatgctgggattacaggtgtatgccaccgtgcctggcccatgaaatctaaattttaattgaaattttcaaaattgttaatgttggcaactaaattttaaatacaacatgtggaccaaatgaaatatgtgcaagccacatttaacctgtgaggcaccaatttgcaatatcagcttatgctaattagcccagctttcctatggaatcggtcttattatttatggtctcaacttgtttctgtggctcctaaaccttatttcactactttggagtgttttgtttaaatcatcagtccaggagatacctaaagttctcactgaccattcttttggctcattgtagcccctgggttctgaagcaatgatatgctttgtattggtgggaattctgccctgggtaccatcagagaaagagagcaagttgccaaaactctctctgtgaaatcaaaaggctttgaggcctggttgtagtttgtttttcctgaagcaaagaagatcctttctttattcccctcttgcagcatcagtgctcagcctaaaatctataccttttttcactagtgactagaagcaagcccagtttcgagctggaggacatctgctcacaggcatgtcctgggaagaggcagctctcagacatgatcaaagggccatcagggtggcaccagagggagcctctcacaaagtgggtgctcacacagccaggatcccaaagtggagtctcaggccaagcttcatccctggaaaggacacagaggctaaagggaacaagaagaatcttgaagggctcctgtcctcatattcccacaactcaccctcctcaaacacagagtctgttcaggggaaatcctcatgtacacgtacatatttcataccaggagcaattttaccctcagccaattgatttccagagcaaggagagaaaactaagatggttcacctaaagcaacactatgcttcatggactgcagtgccaaagatagggtaggaggtatagaaaccaagttgacatagcagggacctggacaggagaccagcaaggggcccaaaagggatacttagaaaaactgcgtttgttgtatcttcccaaccccgatcagcatcatctcaaagtatatcaatcccctttgctgccctctggttaccaccttccttttaagatattcattcaagatatacctttccaaagcaggccttttccaaaactattcctcccccttgacaaaatttccattccttggtgacccattctaaagcaaagtagtctaaaaattaaattcattctaaggtttgattgttcggtaactactcctggggaaaaaactgcatttaaaagagaaagactaaaatatatttttacctaggtaacccaaagtgacaaaccttcagtggagggatgttgaatagaagaggtatgtttatcttggaggcacgtgattttctggctactgcttaatcttacccctagcaagcaacgttattctacacagactttctcctatatggtgagagaattaacacaatccgaggcctgagaaccagagagtgcatccttgactctaatggctgcactattgctcccatagttttgttcctgaagatgcattttaggaagagccttatgaatagcttgatcattaccagaataaagtgtctatctcaactagagcctaatacaaaaaagaaaaagaaaaacgatatcctgttctaaataaaactgctgtttggtaccagttgtagaaatgagggctactggtctccttatctcaggtgggacataagtgtgtgatagagcgtctttcctcagatgaggcagtatcctgcttcaatgaacgtacccacactgtccccacattttccctcttagtcttcccaataaaaggagaagcctatttaggaagaaacagacacaggcatcaaggggctgcattttttttctatttctgccatttagtagctgtatcattattgtgccttgagctctctttacttcagttttctgtctacaaactaaagctggcatttgccacctacctacatccaggggtgtcctaaagattgagttggctgccaagcatgaggcctgctgagtggtaccattccctgagagattcctccaacagcagtaagactgggaagaagggcaggtggatggtttccatctgtccctccaacctgcctcgtagttacctggtgagtttttcaacgtgaaatagacactccagagatcacttttctcagaagagattcaaaacagaatttaaccccatatgtttagtaggaacctgaggctcattgaccttaataaatgactggagacagattgccaattactttcattctctgagaaagaggtcccatcttaagcggccacacaaacacagccagtttccatttagaagcagctgcatgtctgtggtggtctttactctaggcagctacaccactcagcatctgttttgaggcaaataattatgactgagtcaggattataatccccatgggcttcattatgtccagatttcatttctactcctagtcggtcccttgttagataaaaaccctagggcacatggacctaccaataaaaagatgcattagacagcgggacatcagtagtacagctccctccagaggaaaagggctaatcacttgatagcagttctaacaccaccctcaggggatatctgtgaccaagaatagatgtactcaaagttcagtgagaaagttttgagcctggctgtgtaaaccctggcctagtgttttgggcattatttaaaaaaaaaaaaaaaaaaaagaaagaaaagaaagaaaaaagcctgtctgcttttcaccatgtctttgtcccctgccacacagggaagcatccagtacagcactggacagatattcctgaaggtctgtgtgacctggggacccacaaagaacactgacattcaagtcaggggtgttgattgcccctcctgactctgggtattccaagatgccacttacctgctctatgagacaattttctctatgttagttgaggatgataagttctgcccctccttcacaagatgttataggtcttttttaaagctcactaatttggaaataaatggaaaagaaagaagccatcatcaaattttgtaagaccatattgtaaaatgtatactgaagcagtgacagtcatcactttcaaatactgcatagattgttaactaagatactgataaaaagtgagccaataactaaagtaagggaaataaatttggaggggcagcaggtagtcttgaattcctaagaattatggtacaaaaaaaagaatgtctttaatcacgcaagaattggttgctgaaagaggtgctaaaggtactcggcttagtagagctcacatatggagaagcgtcaacccctgagataatctctgactcatggcagaaggggctccatggatacggaaagagctgcatgcaggaactcttcagtccaggccatgtggaaggcctaggacaagattggtacaaaccactgctcctctccagttcccgagaagggtcattaggcgtgctctaagtaagaatgagaacaccaccccaactgcatgtcccattccattcccccagcctcctcttctctcctttccctgaccatgatttaccctctatgcatactgtgtgcaaatgattgcccaacccagcttagcaaagtttagatgagaaaggtttgcctggttggaagaaaaactcttctgagtgtaaatacaatctgtaaaactactaagtgtgtacctagaagtgatagcgaaataggcaaggagactttccccttttgcaattattgtattataactaaatatgtacttggggaagggaggagaaaaaggaaaaaaaattctcggttcagcatttgggtaagaggaaagaaaaacttttatgaaagacagttcactctccactgccctagacattgcagctcccagagccaggaaaaagtggtattcagctctgggaaccgaataccacataaaaaagtagccaccaagttgcagtgggacatcccatagtctccaacgccactgctttctggaagttctacagagcagacaaagaagattctaaaagaattcataaggttgtctgaagggaaaagtagatgaccccatggcctttttctgcaattttttcatctataaaacaaagtggtaaagactcagtttgttatgaagcacattcataacaaacttcctggggaaatctctggcaaaagagagacacgttattgggatggtggtcctgtattctccaaccttccacatccttgtgccagagctaatagtcgtgtgttagactgttacaaagcaaataaaattaacttgacttttcaccatctttgttttttctttttacgtgtcagctgaagtagactgtgaagagactgcctcagtttctagttatttttcctttggagttgagggcctagaaaacaaggcgagtggggtaaaggtggtgaggttggtatgttagtaaatgttcaaccaccagctctctccagggtaaagaaggcagactttgtagtgtttgccaatttccttggtttaaattatcccactgccaccaatttcaagctaccaacctaatgccactgaatgcagagttgggaagatgtgcagtagcataacatgataagggtttccaccatacgactgatgtgtaccattgagtaggtataaataacctcaagaacatagacgatagtaaaataattaggaagtgatcagctttgaatatttattacctttgcatttcatatcttttttatttaaatgtatataacttaattgttaataatgactgttcttaacaaatgactcacagaattcctgaaaatttagcaaatgactcttgtcagccagtacaaaccagctccaacacaccactgggtgggatggaagagaatctgattcagaaagagcatgaaaactttcttgatcaattgagatttggtccattttttttccctctctttcactacacaaatctcaggaaaaaataaactgtatatttgtttggactatggaaaggtgcgatagaatgatatttgttctcttccatgtcaatgagaactacagaaagagttaactttgttcattacaggtaaaaataaactgataacaaaataaaatta

SEQ ID NO: 243 - DNA, 11016 bp, Homo sapiens
  source 1..11016: mol_type = genomic DNA; note = NC_000017.11:50532735-50543750 EPN3 [organism=Homo sapiens] [GeneID=55040] [chromosome=17]
ggagtgctgcctggcgctggctaggaggcaaacgcacgcgggaagagctgctacccattccagggaccctgccgctgcccctctgaggggtctgcacctcctgggagcaggtgggtctctgggacgagggtccatggtggatggctctggagacgctcccgaggctgtgccgtcccgctgctgcacaggtcggagggtcaccgcagaggctactcgggctggggctggggccgagggagcccgcactggaggtaagcttcctccctggccccctccctggcagtggcggcatggaaggcgggggttggtggggagcaaacagtggttctggggcttagtctcttttccaggtgcgagggagaaggctgagctgtagaggacctaaaggcttctttcctgccacccctccctccctgccgcccccaaaaagggactcagggccccctccccaaccatcctgggacttagcatctttggtggcatcttagcatctttggtggcattccccacagactccttctgcacatctctgctgtttcctcttcttcagcccctcatgcacacctctagcctcagggcagtcccccctcccccatcttctgtgctcccgggatgcagctattacagtggccagaagcttagagttcaagctcaccccctgtcccttacagcatcaagaagggcactgtcattccccactgctcaggctggatctgacttggaggcaggggctggagcccaccttagcagaggacgggaagagggtgtgggctgggctggtgggtgcacagactttacgcaaactcatgcacgtgtgactggacagatctgggttctctccatctctccgaaacccttgctggggatgagcgatctgcatttttcggtcctgacttttgggaaactctccagatccccccatcctgcaggccctgagaagagcagcccctccctactgcgcagttctccttgggaccctgtatgcaggagagagctgatactccgtgccccgtggcccatcccaccgcctgctggccctgctcccatcccctcagcttcctccctcctctgccctctcgtcatctctgaattctcaggccctgccctctctgtgcccttccctccacctgacagggtctggctcaaggtcactgcagtaattccatacccagctgcccagggctgctgctgctaccgccaccgccttatcggccgctgggtttctgttacactcccttttatttctgggcatatcgtgttcgataaaaccctttgcttgtaacactgctggcagcgctcccagctgctccctcccgcgttcccgcgttccttcctttcctcctcccttctctgcgcttgggcaggcttcttcctttcctcctcccttctctgcgcttgggcaggcttcttcctttcctcctcccttctctgtgcttgggcagcctcaccttgtcccctcaaactccagagaaggaaaatcaaggtgcctccccatgtttctggccccgcccttccccccagcccctgcaggggtgtgcagagaatgcccaccttctgtgagaaaggtccaggcagggccgctgggcccacaccgagagtcccctcccagaggctggtgcccccacacaggccaggccggagggccagggcagccaggtccaggtagggctctggtgcagtcacagtgcccgactggttctgctagttccagcggccagccggtaggggcgtgtgctgggcgggctttggtgcacattatttcccatcttgactctgccacccccagccacgggttggggaggtgaaggcaggtctgagtcactagcaagggggagggcaggagttaaacaagttgtggccgtggcattcccacagaaggcccacgacccgctggaaggaaagagatagcagacaaaaggtaggctgcgctgtgggccaggcactctccacctcgcccactcccacggtatcttattctctgggcccccaacaaaacctgccaaggcatgttttcaaagcgtggggctgctttgaactgagcccagcactggcggggctggggtggaaggagcgtggaatcgggtgcgagaggacagtctccttcagattcctgcttctggcagcctggggaccagttggggcacgggctgggatggagggtggagccgaaaggtgtttggtgggtgggggacagttcacgggtgaagtggaggctctgcaggcccagacagtgtgtgtgtgcatgcacacaccagtgctagtgtgggaggaatggtggtggtcagggaattcctcttttggtttctgaaagggcctttgggaggaccttgggcctggagttgtattcagcagatagcctggacctgtggctactggggggaattgggctggcccagctcttctccctgctggggtaccagaggtccactatgtgtccagcgttttggggctttggagaacccagactgttcctactctcagggagcttccattctagctgagaaggtgggactgagacagtaaagcaatccgatgaaataatgaccaaactgggtaacactgacaataagaattggattagtcttctggagtcctggatggtagtccaggctctgccacttacgtgccatatgatgcaggcaggtcccatcccctctctggcctcaacacttccatgtgtacgtgggggtggcatgcaggagtgttggcagtggccagaactctgaggggcagtcttcctcaaacgatacttgctctcttgccttctggcccaggtcatagcatttcttctgagccgccctcccctgacttgctggttcactcctccttactcttcccttgtgatcttggatctcagctctgtcaccacctcctctaggaagtctcccctgattttcctggcttgggtcttcctgtgcggctctgcactcccacactggactgtgattttctgtaccctctcaactgaacgtgggtggaccaaggcgtgtgttctgtgcctggcatggtgcctggctcagaaaaggcctccgggaaataggtgttgaatgcatcaaactacaaaaattaacaatatgagaaaagtgagctgaggagctaggaaggataggtcttaagctagatctcagcagaaacagaggcagtggccgagcagaagcaaggcaagcgggcattcctggaatcctgttagcgttcccccatgaggccatgcactcttaggtggggcttcctggggtcatcttggttccccatgcagcagctctgtgatctcggacaagtcacttaatattacagggtctcgctctgttgcccagtggcctgaccatggctcactgcagcctccaactactggcctcaagtgatcctcttgccttggcctcctgaagtcctggaattacaggcgtgagccactgcaccgggcccatttaatactctgagccccacctttcccatctgtggatggaggtaatgataatagcatctttggggtgtggctgtgaagatagatagatgagcatgcaaagctccaagtgcctgctgaattgtaagtgaaataagaacgtgtgccgctgaaggctgtccctggaggcagggacactctggccaggcctcatttagttggtcagtggctgagtgacccatgaggtaggcctctgcccctgagttcctggccctctcttcctcagccccatgtggaacccaaggatgcagctgctctgctaacacggcagcccatccttcaagactgtgacctcgccacagtggccctcagccctccacctccggcgggggcgagggccacccacctccaagtctccagccatgacgacctccgcactccggcgccaggtgaagaacatcgtgcacaactactccgaggcagaaatcaaggtgcgcgaggccaccagcaatgacccctggggcccccctagttcgctcatgtccgagatcgctgacctgaccttcaacacagtggccttcaccgaagtcatgggcatgctgtggcggcggctcaatgacagcggcaagaactggcggcacgtgtacaaggctctaacattgctggactacctgctcaagacgggctccgagcgggtggcccaccagtgccgcgagaacctctacaccatccagacactcaaggacttccagtacatcgaccgcgacggcaaggaccagggcgtcaacgtgcgcgagaaggtcaagcaggtgatggccctgctcaaggatgaggagcggctgcggcaggagcgaacccacgccctcaagaccaaggagcgcatggcactggagggcatcggcattggcagtgggcagctgggcttcagccgccgctacggcgaggactacagccgctcccggggctccccgtcctcctacaactgtgagtaagccccggtgtgtggctgggatggggaggtggcccgacttccattcctggctctgcaatccaagccatggttcataatacctacctccgaggggtgttatgaagattcagacataaggaatgtaacacgcaaggcgcaacacccggcacataggaggtgctcaacaagttagctcagataataacgttgttatagattcattatcattcgttagctgcctgataggatggcgcgatagtggaagcatgggtttggagtcagatagcattctatattctgcttcctccaagctgtgtgacctgggcaaccagttctctgaacctcagtttcctcatctgtacagtggggataagctcacctacctccattgtttgatctgagaatgaaatgagaccaggttcaggaacgtcctctaccctgcacccagacacatggcattccccttcatccccctacctgagggcagcggctagacagtccctgactctcctgcccccagtcatgggggcttccaggatctgaggaatactcagaatggcccgccttccataaagcccttgacagtttgctgagggctttgaggttgtgacctcgttggactagaacctcctatccttgcacctcccttgcccccaagccaggacagggtccatctggaagtccaagagctggagtcagggcacctgggttcaagtcctgcttcaggaacctggtcaggggccctaagtgccgcctgtgcatctgctaaggagggactggagccgcccctccatccgggatgggttgggatggggaacttacagagtgcctggcacactgcttggcccacgggggcctcaacggccgttgttcccctcctctcagttctcttgagcctcagcttcctggcaggcagaggggtgtgggagccgatgggtaatcgtgtggtcacagagacatgatggtcattgcagcctcctcttcgtcaccccgctatacctccgacctggagcaggcccggcctcagacgtcaggggaagaggaactgcagctgcagctggccctcgccatgagccgtgaggaggcagagaaggtgaggccatgcagccccactgcggtggggaggggatgggctagggggagagagtgcctgggagccccttggccttgactcaggctctgtcacccaaagccccagtcctgtgcccaaggacagcacaagacccattatctctgtcggtttgtcgcaggcagggactgcctccctgcctccagtcctctccactgggcctggaaagggtggcgagtgtacaattaggggcacatgctatgtcttggggtgcctgctaccacctcatggtggagtgggtgagtgtgctcagacatattcctaggagacactgggatatgcttcccacccccgcccaccagctatccttttggggagacaaggacaggcccccgatatcatcatctttgccattacctctgtggatccaggaagaccaggcaggaagcagctgggcctcacacaggagggcctgaggaactctcagaggattcagaagcgaaagatcagtcttcctgacctttaaactgcatttcagatgcaggcagggagaaggccacgcccaccctgctgactgagcggcaaatggcccatgcacactgagggtgggcattagtgtctccatccccatgacccaggcaggcctatactgcccttctggtcccaaggtgggggtacagggccaagtttacccctctcttcctccgcagcctgtccccccagcctcccacagggacgaggacctgcagctgcagctggctctgcgcctgagccggcaggagcacgagaaggtagtgggccgagcccgctgggctgccggtgctgctgctgctgctggtggaggtgcttcagggcactaacagcctcctcccgctgtacccggtggccctgctgctcctaacctctcagctgcctcccaccctgcactctctcgactccagcctctggtgcacaggtccccggattcccgcctgagctgctcatgctcctaactctttctgtgccttctgcaggaggtgaggtcctggcagggtgatggctcccccatggccaatggtgcaggggccgtggtccaccatcagcgggacagagagcctgagagagaagagagaaaggaggaggagaagctaaaaaccagccaggtagggagtgggctgcggtgcttgggatggacagggcctaagagatggactgagtatttgtaaagagagagcagagcagtgcctggcatatagtaagcactgatgtgtttattcgatgaaataggggtgggggtgtagcagccctagtcccacattgcatgggctggtgactgagttaacagcaaagtgggatgcaaaaggttcctgattggagacccccggattcgggttctggatttgctgccacttactctatgacttggggcatgtcactgtcatggcctcagtttccccttctgcacagtgtgcttattggatagttccagctctgacatgctaggattatgtgatactgtcaatcaagactagggttggcctaagcacatggtgctgaaaacacctcgggctcatggacatattttctccgcatggggagtgggcagctgctgagtgcaaggctgccctccaaagctgtccatgccacgcccgggtgctgtggtctcctttccgtccatgttcactgtggccagtttctcttggacactgacctagggaggtaggctggttgaaaaacatctgcctttggccttcctgcccctttctgctggcctggattctatcccagctctgcctctccctggctgtgtgacttcaggcaaacccattccaccctctgtgcgctggctggctcatccataaaatgggtacatcatctgccctacctacctcacagggttgttatgaaaatcaggtactctgtggatgaagaaacattataaactgtaaagcactgtgcagaggtgagggatcatgaataggtatctgtggaatgaataaagagaatgaactggcattagcctgacaggtcagggcctgccctccctccaggccccgcccacttctgagccgcggctgcctctcccctccacagtcctccatcctggacttggctgacatcttcgtacctgccctggccccgccctccacacactgctctgctgacccatgggacatcccaggtgggcatgcagggctgcaagagacttccaggctggcccaagagcctcctccttcccagccacttgctgggccaagcacctcctcccaaaatctgagtgtcaccgggcaagtcactcaccaccttgagcctccgccgcctgtgggacaggctttcgtagtgagggctatggagaatgtctgaagggcccagctcctaggaaacgcagcaaaatgttctctcgctgcactcacttgctcagcacgcctgggaaggtggcctgagtcgcccacacctgcaggtcccagttcctggggtcacttgtcaaataggggctccagcctgctgggtggtcctgaggctgcaggccatctgtgacatggatcttctgcctcccaacttgggctgggtaactgggaagggccctgggcgagggataagggtgggcctgggatcatgtctatgctgttcccatttcaggttttaggccgaacacagaggccagtggatcctcctgggggccttctgcagacccctggtctccgatcccctcaggaaccgtcctgtcccgaagccagccctgggatctgactcccatgctctcctcctctgagccctggggcaggaccccagtgctgcctgctgggccccccaccacagacccctgggccctgaactctccccaccacaaactccccagcactggggctgacccttggggagcctccctggagacctccgacacacctggtaagaagagggccagagagtgtgagtgaggagctgggggacttccaggcagggccaaggggcagcagatactgtttgtgttaggaggacagcttctctggaaaggggtcagaccaacacctgccctttttgtcaacccatctcctcttcctctctctcttccgaggtggtgcctcgacctttgacccatttgccaaacctccagaatccacagagaccaaggaggggctggagcaggccctgccctctgggaagcccagcagccctgtgggtgagcagggcaaggggatggtgaggctctggggaatgaggggcccaccccgagcagcctctgtcctcttcctcccacgtcgggcgccaatccctttccccaccaattagctctagcatttctattccagagctggacctgtttggagaccccagccccagttccaagcaaaatggcacgaaggagccagatgccctggacctgggcatactaggggaagcactaacccagccaagcaaagaggcccgagcttgccggactcccgagtccttcctgggtccctcagcttcctccttggtcaaccttgactcgttggtcaaggcaccccaggttgcaaagacccggaaccccttcctgacaggtaagatatgcccttgtccctcaacccaggggctcctgctttcagagcctagcctccgccggaggagcccactcttcttcccaacttccacgacctcccggtgtagggctctgaaccccgggtcactcaaagccactctcgttctgcaggtctcagcgctccgtcccccaccaacccgttcggcgcgggcgagccgggcaggccgacgctaaaccagatgcgcaccggctcgccggcgctgggcctggcaggcgggcctgtgggggcgcccctgggctccatgacctacagcgcctctctgcccctcccgctcagcagcgtgccagctggcttgaccctccccgcctcggttagcgtcttcccgcaggccggagccttcgcaccgcagccgctgctgcccacgccgagctcagccgggccgcggcccccgcccccgcagaccggcaccaaccccttcctctgagccccgccccgtcccataccggcctgcgcctgcgccggacgctccgcggccccgcctccggacccggggctgggcggggcgccggtgctagtggaacgccgagccagtggcggctggtatcccgcggcggctctggaagctggacgcggaccacggcccgggagctagaaactgaacgcccgcataataaagactggaaccctcgttctcagctctcaccaagtggactttttgcggggtgtggcggccgggtctcgaccacagcgtggatcaccggctgtttaggaaactgcagctgcacaacgtggggtgcaaaactgccccgcttcctttacagctcttctcaaccctcacctccatcccccgtcacccaggcaccttcgcttccagatgctgccaggctgtcactcaattcggtcatttcattcatttatcacacatgggcactggggttgggctaacagcaagagacaataggcctttgttcctatttattgggtactgcttacgtgctaagcagatcagtttatttaatgcttgcaacgactctctgaggtagaaaatattgttaattccgttcaggatcccggctacataatctgtggggctcaatacaaaataaaaatgtaggggctccttgttcaaaatcgtatgaagaatttcaaaacagggacaacagagcatgaaaccaagcgcaaagcccactgcagtgcgattgcacaggtatctcaccttgcagccggcactactcccatttttcaggcaaggaaaccgtggctcagagaggttgaatggcatgctcaaagtcacaaagctggcatggggcggggctggaactcaagagtcagacagtctggctccaaggcctggagatcccaggctgggccccagatttaattcagcaaatattgactgactgctgtggacaaagtgctgggctcaccttggagggatccaacctccaggagctcgagcgcagcagggtagacaagccaggggcacgtgatgcggctgtggcagaagccaagtgcaggagctcccaggctcctttgttttactgagtcaccttaaatgtaactctgccctctcccttgcttcgccaaggctagcgagaaactcagtcttagccacacaggaggaatcggaccccttctgggggtttatgtggagtctgggaaaccaagggtggggtgaggcctggtactcaatccaggaggggcccctatgaccaccctcgcctgtttttcttctcaatgctccctgatcactggaccactggacactgatgtgtcctcagtgcttggggtctggctctgcaggcagcctgcagccagcctccatccccctttcagggacaaatggccttccaccagagtcggtgagtggagaggcacaatgccactccccttcctgaggtgggggtaggggaagggagtcccacaatgcagttacaaacaggatggacaagaacacctgctcaggagtcagacttacagggttcaaagttctgctccaaggtttgaccctaacaagaatcacttagtaataagtggttatgctctgtgaccttgagtaaattacttaccctctcca

SEQ ID NO: 244 - DNA, 2145 bp, Homo sapiens
  source 1..2145: mol_type = genomic DNA; note = NC_000017.11:43398993-43401137 ARL4D [organism=Homo sapiens] [GeneID=379] [chromosome=17]
agaggcagcggttggaggcgcggtgggtgtctgcgggggtctcgcggggcggctgcggtgtttcaccgggaaaggctcgaggagagcgcggctcacgagaggtaaacggaccctgcagaccgtgctgaggcggtcccggtgccgggccgctggagctggggtcggccatcggaggagggcgggcgggcaggagagtgtcgcggggcggtggggcgagggtcgcggagtaaggaagggcaccgtgtcaacggcttggggctgcggagggcgggtgggagccggactcaatctccggtctcagcgtctgcaccctagctcttagtttgggggcactgtcgacttcccccgtccctcggggatcttgcctgggggatggcgccataagctctgagaagaggctctagaagcccactgtccatggatcgagccctcaccccccacttgagtggcccaggacctgggagtctctctaggtcccatcgcccccctcacgacccccccagggagtgggggaacacctctgttatgccttaaaaaaaaaaaaaaaaaggaaaggaattttaaaaatgaaggatgggagggtgatttaggaagggatcaagaagttgcaaatcttgtgtgtattattaaacgtctcctttttctcccatgaccttttcttggttcagataacccagctgtgctccctggaaccttcaatttcaaggcctccctgcctctactaggcgccttagctcactatggggaaccacttgactgagatggcgcccactgcctcctccttcttgccccacttccaagccctgcatgtcgtggtcattgggctggactctgctggaaagacctccctcctttaccgcctcaagttcaaggagtttgtccagagtgtccccaccaaaggcttcaacaccgagaagatccgggtgcccctcgggggatcgcgtggcatcaccttccaagtgtgggacgtcggggggcaggagaagctgcgaccactgtggcgctcttatacccgccggacagacggtctagtgtttgtggtggacgctgcggaggctgagcggctggaggaagccaaggtggagttgcaccgaatcagccgggcctcggacaaccagggcgtgccagtgctggtgctggccaacaagcaggaccagcccggggcactgagcgctgctgaggtggagaagaggctggcagtccgagagctagcagccgccactctcactcatgtgcaaggctgcagcgctgtggacggtctgggcctgcagcagggccttgagcgcctctatgagatgatcctcaagaggaagaaggcagctcggggtggcaagaagagacggtgacccaagccccccctccctttcctcccacctagtaggggtctgcacacttggacagcagggtgggaccagcctgtgacctctcagtcagactggggtgcaggacctgtccacctcaatgaaggagagaggagcatggggtgtcccgttttggtgccacactggggtggggatgggagatgggatgtctttgcatatctctctcatcctctctggagaagtgggcgctgcaggactgtggagacgtaaatgtaaactgtgactctacctcgaccctgtttcttatttttcttctctggctaaaaatttttaattggatgtgtttgggggcggggggatggaagtgacttggagaatgtgtttgggatgaaataactatctccccttcctctgtcccccaactggggagtctccccaggctgcttttctaggaataccagtcacatagtttttatttttgtgtctgtgaaagtgccaagaacccctccccacatttgtagatccatgaccctttttataagctgtgtgtgtcctctgtattattgttattaactattttttagcatttgcctgtaagttattaaagactgataactgtagctcttaccttggtctggggcattttcctctccttatcttgccccagagacaattcaagatttctatatggggttgtggcgcagggggagggagatttatcttgaagctgaatttgcaaagcaagcacttataaaaattagattgtgtgttacgggatggcttgtgaaaattataggggggagtggaaaacccctcaagctat

SEQ ID NO: 245 - DNA, 164620 bp, Homo sapiens
  source 1..164620: mol_type = genomic DNA; note = NC_000022.11:25564675-25729294 GRK3 [organism=Homo sapiens] [GeneID=157] [chromosome=22]
acttggtcgggaggcgccggcccagcgaggccgctgggactgtgcactgaggggcgctgaccgttggacgcgcgctccccgcagaccctcgctgaaggagcagggggcggcgcgcgtgcgcggggcgccgggcggcgcgcgagggggcggagcggggaggcgtgctgcgaccccggccggctacagcctgcggcgcgcgcagagcgctagtggggcgcgcggcgcgcgcgcggggcgggggcgcgcggaggggggggctgccccggggcggcccccccaggtcggggcgcggcgggcggcggcggcgggcgcgcgtcccgtccaggtccggagtaaccgccgccgccgccgccaaagctcgccaacatggcggacctggaggctgtgctggccgatgtcagttacctgatggccatggagaagagcaaggcgaccccggccgcccgcgccagcaagaggatcgtcctgccggagcccaggtaccagctgccccggccggcgccggccccaagccgccgccccctgcggccgccagctaccccctgcttcctggagggtcgggcgctgagcctccgctgccccggggcgggtgacacagcggagcgggcgatgcggggccggcctcgtcgttccagtctctgaaatggggcatcggagggccggtggggggcaccccgggagagagcgctccaaagtgcccggcgcggcgccctgcgcgcagcgagcgccccagccagggtctggttatgacttggctggaccagctccatccctgtcgccccctccccccagccctgtcctgtcctgccctgtcccatccccgtggttcttcctgttgcattggtgtagtccccgttggctccttgcctgtcactgctttgcgctccatcctggtcgctccttcttcccgggctcattggtccccctttccaactccatcctctcacctccctctgggccgcttacctggggactgcaggcttgttgcttattgtccgaggtagttaaactgctgttttcagtacttgctcttcttgaagtctattaagtctagtcaccttcttcggcttctcttctattttgtccccgggcaggattttgacccactcagtattctttttggtgccaagtgtgtcacctgagctgctttcctcaacttgtagatctactggtggcactttattaaaaaattgaaacaggagtcacttaaaaagacacttgaatgggtgattccagacaggaatttgttgttaaattatcaaaggagggcccgattgaattggcgaggggctcggtgaggtgcataccaagttgcaattttctctcaaatgatttattattaaggtactagtaaaattttttctagttcatatcattagcacttccccagaaaaaatagtttgtctggttaatagtgagttttaaataacgtatcaaggcttcagtgatggatttttttttctctagctcctttcctaattaacaccatcatgagttgtacagctaatgtgattccttgatgctaaatagctcttggaattgatgctcaaaagaggcatcttgtttatggtgaatttgaaaccatgcaattctgtaaaatattggaatctaaaccaaagttattgtccatttgaaatcatcagtccttcaagcgttaggcgcccaagattgcttaaatgttacctaatgctaagtgatcatcatctgattttttttacaagtcatccatgagccctatgatacagaaaataccagtccccttgttatttgttgtgaaaagctaaattgtgcaaatgaagacatgcttgctaggtattttgagcttgcttttcctccttagcccatgcctcttgttggttttgcaggatgtgctactctttgatagacaatgccaagtagtgaaaatgagggaaaagtgcaaacctttctgcaatgtcgtgagtttaacacccctattccagagtgtagcatatctgaagctaattgaaaaaaatcaatgctgcttaaaatttccggcaaatgggaaacttacttagagaacaagaacgcctacatcaaacctaaatttcaccaaaaaaactgtacatttctaatgtggtagaaaaaggcttaattcctcttttgtcttgcctttcctagtgtccctccaccacccaaaggcagggagtcctaaatatgtagtatttctatatacaaaattgataaatctcaactcatgggcagttttttttttggggggggctagtatataatattaataaagttaggaacttctgttcagttttttttttcttggtgtttggaacttaatgtgacttctgcttttttagtgtccctcttaagaacgtacttatgcacttagggtgttcacttccttgtatgaatgcctttgtttttcagtggtattctttggtaatgctttcttttaaggcagagtaagtgacagccagcattatttctcatgacatttgaaaattgagaaataccaaccagagagtaattttaggaaacagcccttcagtaattgttactctgttgctctttttaaaatagactctcgaattgggccattggaacctcctcctgagattctaatttgttttctacttatcttagtggctttggctttagttttgtaatgtagctatttacatagtaacagtcactccttgtgctgtgttaggattctgttacattgagattatcaggtataacatcttgcaaaattctctctaccactggatggcagttagtggcctacctatttgatttggaggttgggggttggggaatttctagatcctgtaaaaaagttaattgcatgttaaaatgccccagcctaatgacttaaatagctggtatgacttcacactattggtaaaagggatacgggtcaaatgttttctgataagtttctatttcagcttcattatagaggaagccatgtgatcaccagtttttggtattcttgaaagagatgttcagatttgtatttttggtatctgaatgagaagcatacattttaatttgcctttggtctatcactagtgatttttttatttccagcaaattatttgcagtcactattctttgtgcttccttattttagttactttgcctttcccacagttttaaacagaagagcatcagaacgaaatatctagctaatttaaatgaaacactgggtttgcagcttcctgcctattacaggagagtctcagaaaatggaacattctgcccaggggagattttgcttccctgagatggcaagaggcaaatattttgttatgttgacactttattcagttaaccaaccaatgagtgcaaatcctggaaaagctgactgtttgtccaaatggtatagctgctttagtttactgaaatgttgttgagctaatgtagctgataatggggcctactgggagtagtaaactgtgacccacagcctcccttgcaggcccagttaaaacaggagcatttagatgtgcaggccagttgttttacatcatgttggaaaagaaatacttttatttaagtaaggtctaattcacaagcaaaggcccacaaagggtcatcatcttaagccctggagtgattcagacgacttttactgtaggctgtattactctgttactcttttttttttaaaaaaaacagaatgaaattcagatgacttgaaatcacatatagttgaaggcggttgagtaatgtgaacttcatctttcccctggagtcttatttctatttactggacatttcaaatgttggatcacctattgcaaagcttgtcctttcaaagtattcatacaatatgataggaaggtctgaaacaacattttaaagattctttataattttctaggagcactgacagtccttaaaggacatttatgataccgtttatgacattaattcagtacatagttgtagagccatttctatgagccaggcacggggtactatgacaaacccagccacagccccttccttcatggagcttatagactagtgtgaaatacaaagatttgagccaagaaggatgtttgctttgaagtgtatttgcttgaagattttatttaaccacaaacaaatagcgtttggatgacttttattactctatatgcatagaatatagaataataaagaatgaatatagaatatagcataatgcatagaacacatgatgtttggtgttttacaataatttgttagtgattacctttgaagaactatctaaacatagtctccatggtgatatggtagtttgcatctttctgtttgtgtagccaccacatgtaattgatctttaaaaatgtcccagttttcttctttagtggacatggagtttattcggtaattgtttaactccaatcagtaagtgattggtggataacttgaaatactcctctccgtttaggctgtagagttttctgtgtcttcactgtcctgtgctcatagcctaattttgaactgaaaagtccacgttgaaagcacaaatagcctttagaaagaaagtattccttattattgataggagtgtttctatgtgtaagaaacagtagtgttcttgcttctttttcattaaggtacaaattcaaaatgtaatttgttctgacctttcagttattatctcattcttggtccaagttaacttgtgccagtgacttgaagatgcaaggagtgcgtgtagatgtcaattcttagaaatggatgttccggtgaaatcagttttggacctagaatctgccaaagctgagcatcatgaaatgcttcgaatcgagagcctcatagatctctctgaggtacaggcagtcccagcttttacacgcaatggattcttagagacagcctcttacagtgttttccccagtacaccggactttgccaaacatctgtttggacaagggtggaaactatccgacgaaggtgtcaaggcttgaggaagggaagcacaggtctttttcagtcagtggctggccagcaaagcagtgaaatgcaaagtagtattaaatagctagcaggacgcctggcctccctagggtccctggagccctggcaagggaaagagaagtttaacgtccatgatgtaataatgtaataactgcctttaattgagagctcatcctctgtcaggcagttggcataattagttcatttgtccccacagtagttctaccaggtgagttgcattagctccgtttaacagaaggagcagacactcagggaaggtaaggagctcagcccaggtgacacctgacagtgggagaggcaggagggacgcccaggtttcgcccagctcggggtctttccccgcccaggcagggtcttgctgggctgccccaccaaaaacgaataccaaactccctcgcgtcttattttgcaaggaatggatgaaactgcgatacttttttatttgggggaaaaaatcctttttcgtactctcccgatcagctacgagtcctcagagactgatagagaattcctctgggacctgcgaaaacggtaattatgagtaagtgaataagcagcttgttccttatttcccatgagcttgaaggtgaaatgcctattctgtttaacacaagtcatgcaatcttgctggtgttaatgagaaattgtgtaatacaccatctcaccccccaaggcctcaaaacaggatttctactgtctttttatttagaaaaggggccacctaagctgccctgtctcctttttatttaaaaaaggggcagcctgagctgtcccctcccttgaaattttcatttctgggaaaagagtaaaagggaaaaacaatatttttggctttatttgcaataaaaatcactttctcattcacataatcttcctttgttagtacagtcacatatctgcggaccactgtaggtgaaaatgtaggctgtctgcatggctatcattgtctcttcttattctctggacattggcaatggggaaatggaaatgattaatttggcaacttttactctattattgcaaaatcatttgtatggtaagtaatttgcatgcaaatgggactggatatcccggcccccctctgcttctcctgtgtcttacttttttaatcttcccttcctatttttatcattgattagaagttacaacccctgggccctttttgattgctctatgagcctaaaatgcagaataagtaataatgtggctcttcatatcctgtaaatgtttcttctaattttggaagccttcttttgggtcctctgcttccactggagcatacacatatttgaatactttctatgtaggacactatatagagagcccatggcgaatgcagtgaaaatatttttgcgacatattttgtaaaatattttgtgataggtagttggtaaaggtcagcttgatccagccttggacctatactgttgtttgccaccatttccttctcctgcagtttcaggagcagaaaaagatgctaatgtgaaaatagccagcccagacctccatccttagtgcaccagaaagccactgtcattgctgggcccctcgttttcctgtgccatccctactacctaccaaactgtcatagaagagaaggttctaaatcagaagccagacattaaggatctgattccactggcagcttgctatgggacctctggaagtcacttaaatttgctgtatttagtttctccatcagtaaaatacattatctatttctttctgattgtataatgtcccaataaaaatctgccttgtgagcattttctgtctatgcaatacatttgtaaataataggaaacattaaaaattacccatattgaatttcagacacggataactcaaacaaaaagatgagaaggaatattaaaagaaatgattaaaaacacttatactatagggttattgttgttgagattatgtgtagtataagatacaagtacacctttaaaaaagtacaacataatagcgaatattaaggcagtcttgcaagtgctgtggtgccatgtgctctgagggaggagggagtgggtttgggaggcaggacttctgaaaagctggatgattggctggaacagagaagagcaattgttgagccttagactcataagtaggttgattgcccagatttctcagttttcctcctctagctgcttattgtggtactgtgtgtctagaaccttctacacatgataccttactcacacttttttttttaaaattatactttaagttctagggtacatgtgcacaacatgcaggtttgttgtatgtatgtatacatgtgccatgttggtgtgctgcacccattaacttgtcatttacattagatatttctcccaatgctatccctaccccttccccccgccccatgatagaccctggtgtatgatgttccccaccctgtgtccaagtgttctcattgttcaattcccacctatgagtgagaacatgtggtgtttggttttctgttcctgtgttagtttgctcagaatgatggtttccagcttcatctatgtccctacaaaggacataaactcatccttttttatggctgcatagtattccatggtgtatatgtgccagattttcttaatccattctatcattggtggacatttgggttggttccaagtctttgctattgtaaatagtgccgcaataaacatacgtgtgcatgtgtctttatagcagcatgatttataatgctttggatatatatccagtaatgggatggctgggtcaaatggtatttctagttctagatctttgaggaatcgccacagtcttccacaatggttgaactagtttacagtcccaccaacagtgtaaaagtgttcttatttctccacatcctctccaacacctgttgtttcctttttaatgatcgcccttctaactggcgtgagatggtatctcatcgcactcacactttcttgcttgcttgctttcctccctttcttctttcctttctgtctttcatctatccatctatccatcccgtaggctctgggatggtggtatcagtgcctaagagttgcaagcctgctacttaaataggtgtaaccaggcaattagcagagttgactcattctttagaggtttttgtttcagaaaaatgaaccaaaaatcatgatctgaaagcagctggcttcattgtattgtgcataaggtgattcattacagtctttcttagacattaacagattgtatatgaataacataggattgtagtatctcatgtttgaaaagatgttgggggacatccaatctagttatgctttttgatgagtgacttccctctctaatatctagccacaggcatctttgatgagcatctttggaaactgttgtaccagaaagctctcttgtattaccttctgtgcactggtctcttattatccttttgtggttgtgagaaacaagtttagttcctcaaatgtgacagatcatcaaatatttgaaggcagctcctctagctcaagatgccttttataggaagctgtccccagctcctttacttattcctcataatgcacactgctgtgtgtaatctatgctcattagtctgaacattactgagctgagtaagaatatcaaaatttatgaagaccaaaaagagatctgtaaaattatcataattaatttagtaatggcaaagctagtaataaattctatttcaagtgtgtgattgagtccctctgaagttccattttaggatttggttccttgaatgattcaaaattcattataccagtttgcttaggggatgaatattttcattagtcagagtttggaagccaggtatgggttacatgtgtattatgacaacagctgccattgctgactgctaagtaggtactaggcactgtataattcttagacaattatggactaaaatatttcaggaagaaagtgagctttaaatatgcagaaaaaggtcataggatattagggggtatgtttcatatagtcaaaaacataaaatgactgtaatcccagcactttgggaggctgaggcaggtgaatcacctgaggtcaggagttcaagatcagcctgacaaacatggtgaaaccccgtctctactaaaaatacaaaaattagctgggcatggtggcaggcacccacaatcccggctactcaggaggctgaggcaggagaattgtttgaatccaggaggcagaggttgcagtgagctgagatcgtgctattgcactccagtccgtgtggcaagagcgaaactctgtctcaaacaaagaaacaaaaaaaccaaccaaccaaccaaccaaccaaccaaacaacaacaccaacaacaccaccaccaacaacaaaaacccataaaatcccattggctggggaagacagcaagtttcttcaatgtcagcaataaaactttcttgaataatatgctgttagtatttgtgcattgtgtcattaagtcggtccattgatctttattatcttgtttggatactaatatgtctggttatattttcaggtgtatttcttgtaattttttttgtatctttattgcctttgataaaagtttaaattaaaaatgaggccaggtgtggtggctcacgcctgcactttgggaggacaaagcaggaggattgcttgagctcaggagttcaagaccagcctgggcaacatggtgaaaccctgtctctaccaaaaatacagaaaattagccagacatagtggtgcgcacctatggtcccaactccagctactcaggaagctgaggtgggagggtttcttgagcccaggaggcagatgttgcagtgagctgaaatcatgtcactgcactgcagcctgacagagtgaggtctcgtctcaaaatacaaagaaacaaataaaaccaaaaactaaaagttgcatggaatggcatttacacagctgttaaatattgcagactttcattttcctttgtgaatgtctaaggccgtgatggtattttggaaacatcttttttaaaaaatatgaggtatttggtggtggtggcggggtctattctctatttaaaatggaacgaatcctaatggctaagtaagatcaagggactttaatacacatctttaacctggtcctacctttttcaagtgaattttctttgtctttttttatattatgacacagtaactgggaagagaatcatgcaataaatatcgtcatcaccagtaagtctagaatagcgtgcaaaatttctgtgctatctttttttgttccattttggacctgcttctttctgttttgtttctagtggcagtggagaaaagcttgttttttatgcaaaacatcccaataatatagaagagaaaaattgcacaatagcagtttctaagcaatgaatgagaggacacgtatgttggtgactttgttgtttctcttcatccctccaataaataaaaccgagagttttgtggacagggatttattagagtttcatcatttagttgactggcttattaaattccacatggaaaactagcttgactctccacatttctgtcctttaagtaaggtgacctgcttgatgctggattgatgtttcaaaatattttaaaaattcaggctactctataagaaaagcttatttggaaactccttcttttgagatgagagttctaagtgaagcgttatggcctatggttatgactagctggggtagcatagatgatggtggagcagatagaaacagcagggcaagtttgaagtgctcagtggtgctagcctttcacaaccctctttcccttactttcaggaaacttatgctctagaactagggtttgaattgggtcagtattgaaatgatcttagtgagaggccaacttgctggacttctcttctagatctgtagttataaaggttagctcattaaacccagtgacagtagatggtcatttatttcgtgtttattacagtggatggtcatttatttagagtttaagaaaaccccatggtagatagtcatttatttagagtttaaaaaaaccccactaagatttgtagatgatgttttatagttttatatatattaactctttttagtttttacaattatgcttggtagcaggtagaaattttaaaaagaaaaaaattactccagatacatccatgtggagacattgagaggtatattttatctgtttgaggacagctggttttctccttagatactagtgtcttgactgtggggcagggagtggctttcagccttccagactcagaaactagattttattatgtcactgtactaagcatctgtctcttattgtgaaactcacataatcagccaagtctgcctgactaaattattctcttcctataggcctctggttcttattttaagattaaagacccttttgagaatcctactaagtgagagcctccccctcccaaaagtgcgctaactcacttacacagatttatctgaaaagctacactataactagaatgtccagtttgctacattgcattaaacactggctcccacaggagcctacgtgcccagcgtctgtgtggctggagctctctctcgtgggtcccccttgtgggaagcaaaacgaccatcagaaggtggtatagcgagcacagacccacagtcggatgagtcagatggttacttgggaccaagtcacccctcctaggagtggcttacgctggatgtccagtacctgaaatccctgactacagtggctttgggacaagtcatctttccatattttcatgtttcccattgtaattggtgggcacacgtccactggatttgagactatagttcatgaaaccactgccaaagctgcctagaccagaaacctttgccatttcttggccatttgtgttatgtattgatttaaagtttttattctcagagagcaagcttttttctttatttagagattcttggaaatggctctgtaatactcatcatcttattttagaagaaggaaattcaggttcagggagaagctaattgctcaaggtcgcgctgataacaaatggtgcagctgagcttcaaatccaggttttctgattccaaattcagcgtattttcagaaaaaccttcagactgtctttttcctggtgaatcttattttatgaggagggggctcatggatttgactagaggagcactgtcaatttcagacgttagtgacacaatttgaaaatgcattgtattcattcagtaaagattatccactgcaggggtctgaggaagtgctccagtagcataatttcactggccatgttaacttaataataaatacattaataatttcctagaagaaaagatgtcatagattccatgttaactaataagattgttattaataatgatggcagtgttataacttgagaaaccaactaagctacatgtcatgagttcttaatgttttcttaccccaaacatctttttgtgattttaggtgcattcttaattaaaattcatctccatgcctgccagttggtaaatgagtatccttgacttgaacacgtttgtcagttactctagatacaataaaggattttttttttttttgagacagtctcgctctcttgcccaggctggagtgcagcggtgtgatctcggctcactgtaacctccgcctcccaggttcaactgattctcctgcctcagcctcctgagtagctgggactacagatgtgcaccaccatgcctggctaatatttttctactttttgtagagacagggttttgccacattgcccaggctggtctcgaactcctggcctcaagtgattcaactgcctcagcctcccaaagtgttgggattacaggcatgagccaccgtgcctggcccgtaaaggatttttaatgttaaacttggcactcattagcagttcattctaaattgtgatggaaaattaatggagcgggttgcatatctaacccctacccagaaaggttgttgagctcagcttgggacagagttgtatttgtcaggagcacattagtaaatccacttatggcttttgccttcttcacctagtaatgcacgtggagcttttcctcgtcagcagtatatagatctgttcagtgtttggaattgctgcatgagatgtcagaactctgatctacttgaccctgtgctcataagcccaagagcaattgcagtgaatgttcttacataggtgcctttgggtctatgtgtgagcctttctctaagatagacacctagaaataagtaagatatgggcatagtctactctacgtagagctgcaaagaaattctaattttattcagaagctttactgttaagagtaatattatttttagtttgaaattatttcatataaacaattatttcatatatatatttgggtaaaacaaaaaagaataatgtcatttttggttagaaccaagaatttaagtgtaaatgaagagatacatgagtacaagataagagttaaataaaaattctgtaagatcaaatttgaattggaaggttatttgaaattcatgatttttttttcaaatatgtgtgcttatcatccccagtctttaaaaaaatcgaagaaacaattgcatttccatcacataggcacctcatacacctgcgcctgactccaggtgtgggtgagatgagcctggaccctctgttacctgttgtatcagaaaaaaaaggagccatccaagaaatgtggtgggcaccttcgctaacaaactctgaggccagaagaaggggtttccactggctaaaagtgagacaccctgaacatcaaaagaatatgactgatacaaaccccctgtggtgggcagaatgatgcccccctgaaatatccacatcttaatccccagaacctatgaacatgttatgttatatgacaagggggcgttaggggtgtaggtggcatcatagcagctaaggtgctgagtttaagataaagagattatcctggattatctaggtgggccctagtgttaccgccagggaggcggagagttggtgtcagagcgatgcaacatgagaatgagtcaaccaaccactgctggccttttgaggaaggaggaaggggccatggaccgaggaatgtgggcagcctgtagaatctggaaaaggcaaggaaatggcctgtcccttacagcctccatgtgagaccgcagtcctactgacactctgaccgacctcagcccagggaggcccatttcagacctctgacctgcagatctgtaagagagtcaatttctgcttgatttaagccaccaagtttgtggtaatttattatggctgcaataacaaactaataacaaagcatgagtttgtggatatctcatgctatccacaagagatccccaaacaagacagaagagaacacctcattgatcaccaccagcagtagaaccaaggcacctactctgtctctgaatagtggcaattgaaaaggtaaagaattaagcatttatcctgcctttcctgtaaaaactgcttcttagggtatttagaaccctagttgatggttggggtggcaggacaggaattctttttttttttttctttgtgacacgctctcgctctgtcacccaggctggagtacagtagtggtgtgatcacagctcacttcaggctcaacctcctgggctcaactgatcctcccacatagctgggactaagggcacatgctaccatgcctggctaatttttttttttttggtagatatggggtttcgccatgttgccaaggctggtcgagaattcttgggctcaatgatctgttcacctcagcctctcaaaaagttgggattgcaggcttgagcctctgtgcccgaccaatgaatgaggggacttctttttttatttttattattttttttttgagatggtgtctcactctgtcccccaggctggagtgtagtggcatgatctcagctcacttcaagctccatctcccgggttcacggcattctcctgcctcagcctcctgagtagctgggactacaggcacccaccaccacacccggctaattttttgtatttttagtagagacgtggtttcaccgcgttagccaggatggtctcgatctcctgacctcgtgatctgcccgcctcagcctcccaaagtgctgggattataggagtgggccaccgagcctggccgaggggacttctttacagaagaatggcagcaaattaatgtggaaggaatggcgaaattttaaaaaaatccccattttgcaattcttaatgaaaatattgatttaggcaaagatcatcaatgtatgatatcgctaaatgaaagattgatggggaatttcagatggagagatcagactatcaccaactgaattttctaagtaaaatttgcatcactaggatgaaataactgtgtaccccctaatgtgaggcaatataagtaccaaaaccatctcaaaagtattcctgcccccaaatggtggacttgaatatgatcaagccttttgaggtaactttcagtttataggaaatatggagagagaggaacagtgaaagaccttatagggaagcaacagacagaaagggcatcccccatgatggcttcctcggcttcctcagggggtcactgcagataaaggtcaggggtggggacagtcaggtactctccctgtctgccttaaatcccagaagagatttaagagatggcgctatcagatgaatgtgtggatcttggttagatccagattgaaacccaccagctatacaaaagacacttgagtcatggaaatgtggttagagactgggcattggatcttcaggaattatcaatttgaagggggagttgggaagtgataatagactgtgtttatatgagaaaattatccataatttttagaaatgcaaactgaaataggctaaaacgacatgtggtctgagatttgttattgattgattgattgattgggatggagttttgctcttgttgcccaggctggagtgcaacggcacaatctcggctcactgcaacctccgcctcctgagttcaagcaattctcctgcctcagcctcccaactagctgggattacaggcgactgccaccatgcccacagctaattttttgtatttagtagaggcggggtttcaccatgttggcctggatggtcttgaactcctgacctcaggtgatcctcagatgagccactgtgcctggctgagatttgttttaaaatgctttaaaaaataaaggtgggataagtcgagtggagtggctcatgcctgtaattccagcactttgggtggccgaggcaggcggatcagttgaaccaggagttcgagaccagcttgggcaacacaccaaaacctcatctctacaaaaattagttgggcatggtggcacacacctgtagtcctagctacttgggaggctggggtgggaggatcacttgaacccaggagagtgaggctgaagtgagctgagattgcactcctgcactctaatttgagcaacagagtgagactctgtctcaaaaaaagagaaaagtaaaagaaaaaaaatggagggtggggtagggaaaagtagcagattacaatcttggtaacttccaatgaggtgctgagtgatgggtctaggtgttcactatattatatccttttgcatgtttgaaaacttttgcaataatttttcaaaacagtagagaagatggctaggtgtgaatatcacaactgtgtccctgcagggctaatggaagcctcagttttcccaatgtcatgtgtaatagcactggtgacttaagatgtactatataatttctatgacagcatcatacacagatgcaagatgcaagtgtactgcatctcaaacaacttagattgacgggaggatgatgtgttttttggaaactgcattagatgactcaaaaagaggctctgtgacactgattacaaagatgcgggtagagttttaagaggctcgtttgcaacctaagagtcccgactaatccaaccagagtggacagatttacaacttcttgacctgaaggcttgctatagaaggatgagaaaaaaaaaatgtaagaaggctattgaaaggagaaagcacagtaagagatcatactttagaaaacgatgatctgtttacttcctgagtgcaaaagacttcactgacttattcagatcatgggtatctattaaatcacggctctgatgtttaaatttagcagaaaaaaaaaaaagtaacccatgctctttaagataatctaccctctaagcatactatccatgcctaatgaaaccttgcaatgtaagtctctcttattaaaattatgttaacagctttctatttttaaattacttgaatattaatttgtgaaaacatttcagaataatcattttaaaataaataagtgtttcatggctgggcgcggtggcctgtaatcccagcactttgggaggccgaggcgggtggatcacctgaggtcaggagttcgagaccagcctggccgacatggtgaatcctcgtcgctactaaaaatacaaaaattagccaggcgtggtggtgggcacctgtaatcccagctactcaggaggctgaggcaggagaatcacttaaacccaggtagcggaggttgcagtgagccgagatgagattgtgccactgcactccagtccaggtgacagagcaataccctgtctcaaaaaaaaaaaagagtgtgttgctctaaaccgggcctcactaagtaattaccaacaggaccagtgtgaagaaaaaaagtttattaagagaaaaattttaaaaaatctgagtaaattgagagctgtaacatatttctagacaggaaaactcgacattgtgaagatgtcaggtctccacaaattaatctgtaaattcaagaccaaaattcaaatgagaatcattccaaatgagaattttagagaaactcacaagccagtgctcattcatctgaagaaaaaatgggcaaaaataaccaatataattttggaaaagtaaaacaatggagatttgctctaatataaaacattcctctagcaactaaaacagtgtaaatattcatgtatagatgtgtacacatatcagtttggtttatgttaaatacaggtggcatttcgagtggaggaggaagagtgatgtgtggtagctgtctatcaaataaagccataattcctccacattatacacaaaaataaattccagggtatttaatgagataataaaaaagctaaaaatacaaaaaaggaatatattcttattgtggagtacagatactctgggctttcctaagcaaaccccaaacctggaaaccacaaaggaggagatgaatggatacgaggacatgaatgaaaagttggcatgtgacagagatctcagaatccaaattaaaagacaggaggaaaaattacattgcatgaccttctgtggagcatgttttagtttgtaagtctatctgcttagatagcgcatacttactaaaattcctaactggctcttgtcctagggaagagagggggtaggaggcctgaactgtgtttgggtgtccaggaagtaaggcaatttgtatcaaatgagtcgcctgtttgctagtggtaatttcatccgttagtcattgggaaggaagagcttgctttaaaaatgccacagaaagatggacgttaatttcataggtggtaatttaggaattcttctcacatggctacaaaaataagtcagtccaaaagtggaggctatttgtggcctggcgtttttctgtgtactttttttttttttttttcttagttactgtcatccattgtctgttccattaggttatttggggcaggctaacaggacttacacagtccttccccttggaaggatcagccttgcccacggtcccttagattctgtcattgagctgtagtgacctgggttctggggcaccctgcagtcacactgtttagactgtctgtgtcctctcctgtcaccccctctggacatgggctccttgaaggcaggggatgagtggggttcactgtgtattctgagggtcagactcagtgtctggctcagggtaaggatgcagcacctatcttttgaatgagcgaatgggtgaatgaacagatgagttgtcttttccttttcctcccaatgagtctatgtatttaatagcctatattagacatagctaatataccaagtatttgactcgttagagacagctgtggcaaagatttgattcttcaaatggtgcgagatcagaaattcttgaattcatttgaatgtgcagaaatattgtataggttataacatcatatttcaaccccaaatttggacagatttggcactatagcttttataaactatgaaaaatagttttctctaaacaatgctacggcagcttatgtgagaaaaatactagagaaaagctaatgatttattaatgagtaaggaaatatgcaaatatgaaactagaatcaactgggggcagaagtagggaagtgggagtaaatgcctaaaatctttgggagtactttttctggaagactttgatttgttttgaaaagtggctttgaaagctctgctttagccatgtggtggttcccccattatctgtggttttgctttcagcagtttcagttgtctggagtcaattgaggcctgaaaatgttacatggaaaattccagaaatagataattgctaagttttaacttgcatgccattttgactagaaagatgaaatcttgcaccattctgtctggaacgtgattcctttgttcaaggaatcctcagtgtagatgctactgccctgtgggtcccttagtacctggcttaggtatcagatcctttgtaacccttattttattgaatgatggccccaaagtgtgtgagtagcgatgctggcagttcagatatgccaaagggaagctgcaaagtgctgcctcagtgaaaaggtgaacattctcaatgtaagagaacagaataaatcatatgcggaggtttctaagaagtaagaatgttctatccatgaaattgtgaagagtatattgttataattgttctattagcagttattgttgatcccttactgtgcctaactgataaatttaactttatcatagatgtgtatgtataggaaaaaacagtaaatataggattcttatactatctgcaggttcaggtatccactggccttgtatttctttttttagtcaagatgatttgagaaacttagatacagggaaaccctgtgcccggtcacttgaatggaaaggccgtctttattaatgaaaacatggcttaagctgttgtaaccaagagaccccaaaatgagatggcccccacgtccaggccacaccacagaccatttacatcagactctccctggagaggcccagtcaccaagctttttagaattcttcccaggtaatcctaaagtctaggtaaagtggagaaccactggcctggagttattcagaactgactagggaggggactgggttttgcagcccacagctttccctcatcctgggcttgtagaacagctctgcctgcctcgctatagggccttcacctctcggccaagcctcgtgttatgggtgtttcccactcaggaggaagtggggtgcacaagttccttttaaggaagtgaagtggaagtagcatgtttcactcacattccattggcgtgtgctaggacctgtgactatgtaaccgcaatagaggttgggaaatgtgatgtgaatctggttggccatctgccctgctcatttttgaggtgggaaggtttctgttactgataggtagaatgtaatggttaccatgctatccattaattaaaactatttattatcaattaccaattatcaattctaaagctgaacagagttcaactgacctcatatatatgtcatgtgagataattatacacatacacacacaggcaagctatgagctagatgcaaagacttgggagaggctttagtttacgttaattacaaagttttaaagtttacatttactaagcttttagtttatattaatcataaagttgttgctctttgttccactgtcatttatgagttgtttaggagtggaaacactgctgtgggtgactttttcatttgtttgggctcccttggtgcaaacttagaggcagaaaagcgttttcagccaaaacgtattccagtgatgtcagttgcaatcctgggtcatcacataaaggttatagcaacttcaagggtgtagaatctgaaaaaagttaaggttaaataggaatatcatttctggtagggcatgacattttctagagcccccttttaattatcttgctatatacactcttacttgtagaaaccattcttgaagggttggggaaggctccacggtgttggtgggtacagatttagtataaatgaattagtcttactcatctttctatattcttgtgaccagaatacttccagacccataacagattcttagcaaatattaactgacatgaatatgcttatatcattgtgtagtttatttagaaaaatgatactctttcactcctttgtggacatttcacagtgacatgttgagtcctttggtatgcaacagtgttgaaggtgggggattgagtactagaatgattgctgatgtctcttcaagggtggtgggagacacagggacttctatcattaacagttagaaagagtgaataagacctgctgtgcaataacacaacagagtgactatagtcaataataacttaattgtacattttaaaataaagagtataattggataatttgtaactcagaggagaaatgctggaggggttggatactccattcttcatgatgtgcttatttcacattgcatgtctatatcaaaacatttcatgtccccgtaaatatatctacctactgtgtacacacaaatgttaaaagataaattaaaaaaaatcatgacagtccattgtgggaaatgatatagcagtgatgtacagcaagcagtaggaacagaggtgggagggctcacctctgcagagttggggagggctgcatagtcttggtgacccctgaactgggtcatggaggatgagtaggagattttcatgtgaaaaggaaagggcattagagggaatggtatttacagagtgatggagctgtggaagagcctgtgtctttcatgaaaaatgaaaaaatcaagtgtggctgcagtgtgagaaagacaacagcaagacctggttgaggcagcctccttgaaaatgctccctgcagtacactaaggggtttggacgttgggcaaagcgagaggcccttgcaatctttttttttttttgagatggagtctcattcaggctggagtgcatggcacgatctcagctcaccacatcctccacctcccatgttcaagcaattctcctgcctcagcctcctgagtagctgggattacaggtgcctgccaccacgcccagctacagctaatttttgtgtttttagtagagacagggtttcaccatgtcagccaggctggtctggaactcctgacctcaggtgatccccctgcctcagcctcccaaagtgctaggattataggcgtgagccaccgtgcccagtggcccttgcagtcttttaaatgagatgattacatggtccgatttatattttagaaaaattactcttggaaacaaggaggctgcaaccctccctgcatgaggcttcctgaccctagtctctgtcctctaataatgccacagccatagaacatagtctcttctgtattattcctgatttaaaggattttgatgaaaaggtaaatggattctgaaatgattcttacaactaatttattttatttttattttttattttttgaggcagagtcttgctctgtcacccaggctggagtgcagtggcgcgatcttggctcactgcaatctctgcctcccaggcttaagcaatcctgccacgtcagcctcccaagtagctgggaccacagacacgtaccaccatgcctgggtaatttttttatagttttggtagagatgggtgatgtggtttggctgtatccccacccaaatctcatcttgaattgcactcccataattcccacctgtggtgggagggacctggtgggaaataattgaatcacggggcagtttctcccacactgttctcgtggcagtgagtaagtctcacgagatctgatggtttgataaggggaaacccgtttcgcttggttctcattctctcttttgcctgctgctatgtaagacgtaccctttgccttccaccatgattgtgaggcctccccagccacatggaactataagtccaattaaaccctgtttcctggatacattacccagtctcgggtatgtctttaccagcagtgtgaaaatggactaatacaatggagtttcaccatgttgcccaggctggtctcaaactcctgagctgaagcgatccacctgcctcggcccctcaaagcgctgggattacaggtgtgagccaccacgccctgcctgttgtaactaatttaaagggatagtttcaagtataaaggttcagtctctttgattaggtaaaccgaggacaccataaatttatttgtcattcagctggtgtctgtttggggatgatttttgtatctgatgactgtgggccagtgaaattcaagtatatttattgtcaccttaatatctagttatattgcaaagaaaaaggcattaaaacagaatgtggattatcaaaatattataggaaaagcacaaaataaatttgtagttagcctaattgggttgttatctgaacatagattgtcctgtgctgaattgtttagtactatgcaaattatatgagactttcctgtaaaagacataagaaactgaggaaactcaaagagttgacattaaactatttaagattcttttacagactacatcagaatcctggtggagtttagtggttttaaatctagtggtcaagtctttattgtgactttggataacagagctctgttttgcgtgcttgatgagtggtttgtggaaaatacttagtaactacatataaggaaagtagtttcattttgggggaacagaatcttgatatgattgtgtggtcattaaaaagaatcttttggttttcttgagggtcagtaatggtaacaattctcatttgtgtgctgcttatagttcattaattttttttttttttttttgagacaaggtttgtcgcccaggctggagtacagtggtaagatcatagctcactgcagcctcaaacccctgggctcaagtaattctcctacctcagcctcctgagtaactgagactacaggttcatgccaccatcttggctagctttttaatttgtttttgtagagaggggttctcgctatgttgcccaggcagttctcgaactcctggcctgaagtgatgcttctgcctcagcctcccgaagagctgagattatagagccaccaagcccactcactgcttatagtttagaaaacactgttttacaaacttgttcaacctttatgactaccttattatgtgctactagtttttctaggcaatatgttacctattaattaaaatatttgcttaaatgcattttattttggacattagaataaaacataattaaacctcagatagaatatgtaggattttaataatgtgaggttatctagcagtgtcctaaacattgtagtttctctaccagtaaggtgttgacgtacaacctagcccacctattcttggcccgtagggagcagatatctggtgtctggtctttcaaccactttcgtagtagaaaataaattaaaattataatacaatatttattatacttaccatggatttaagtagcagtaggccatgacaggtagggctggtatatttccagccagttggtattaaattaacacaagtcattatgcctccaagcagtatacagtgtatgatatacataactcttattttggtgaggaggagtataaaagtaataaccctggactctggaggccggaatttgatgctttaaaactttgtataatgaaaattttaaacatttacagaacgagagaataggagtatgaaattgatacagccatcactcggctttctcagttattaatactgtattagtctgttctcacactgctaataaagacatacctgagactggataatttataaaggaaagaggtttgatggactcacagttccacatggctggggaggcctcacaatcatggtggaaggtgaaggaggagcaaaggcatgtcttacatggcagcaggcaagagagtgtgtgcaggggaactcccctttataaaaccatcagatctcgtgagactaattcactatcatgaaaacagcatgggaaagatccggctccatgattcaatgacctcccactgggtccctccctcaactcgtgggaattatgggagctagaattcaagatgagatttggatggggacacagccaaaccatatcaaatacatagctaattttgttttatctatacctcctatttcccttagattattttgaagcatgtctagagatcatatatataatttcatctttaaatatttctatatgcattcctgaaagataaaaactctttcagaatacaaaagtgaaagtggaatacaatgccactgcgaaaaaaatgttcccttaatattatcaaatagtcaatgcacattctcatttctctatttttttttttaaagaatactgttttacttgaattgagtttttaataaggtccatacattatgcctgattgttatttcttttgattcttttttgacctatacattcctcttctatcattattttctcttgagactttttgttaaagatatcaggtcattttgttgtgtagtttccccacactcagggttttacttactgcatcctaatggtgcaattaaaacaaacaaacaggccgggcgcggtggctcatgcctgtaatcctagcattttggaaggctgaggcggatggatcataaggtcaagagatcgagactctcctggccaacatgttgaaaccttatctctactaaaaatacaaaaaattagccaggcatggtggtgggcacccacagtcccagctactcgagaggctgagggaggagtatcacttgaacttgggaggtggaggttgcgccactgcactccagcctagcgacagagcgatactgcgtctcaaaacaataaaacaaaaaacaaacaaacaaatagcattattgaggtataattaacctaagataaacaacatattacaagtgcacagtttggtgagtttatctacattggcaaaaccattacccaaattcagataatgaacgtctcaattgtcttaccagctgggcgttctacaattcaatttgattttgacaccaccttaagttagcagagaccccctccccactgctaggttaagggctcattcccacaagactgccccaattcagatgccagctaggaatggggttcccagtctcccatacttctgcctggctgaccacaaattcacgggctcccatgaccatcctctccggtgtgctgtgtcactagaacaactcacagaactcaggaaaatgctatccttatgattagttttattatgaaagatgcaactcaggaatagcaaaatggaagaggtacatggtgcagggtcttgcagggaggggtagagagcagagcttctgtgccctctctgagtgcaccaccttcccatctcatgatgtgttcacctggaagctctccaaactcttcaagagtttttaagcaaagtaggcttgattgcagaaagctttgggtgttggtgacagaactcaatccccagcctccctgaggtcaggggataagggtgaaagtcttaaccctctagtcacacttttgcttcctctggcaacaagcccccatattgaactatctagaagcccaccaagagtcagctcattagcataaactcaggtatggttgaaaagggctccttaggaataaaagacactcctatcaggaaatttcaagcgtttttggagctctgtgtcaggaaccagagacaaaaactaaatatattttttattataccacatgcaccatccttaaaagtttgctcctgcctctttgtaatcaaacgttgtgtacttttttggggggtctggcttctttaaatcagcagttattctgagatccatctgggtttttaaatgtattcatagttcattcattttattgctgagtactgtttcattatagtgatatgcatatttacttacccattgtggctattgtgttgcttccagcttttgaccatcacagataaagctgctgagaatatccatgtataaatatttgtatggatatatgctttcatttctctcaggtaaaatacctaaaaatggaatggatttatcaaatggtaggtgtagtttaactttactctctaagaagctgccaaagtgttttccaaagtgtgtgcttcatttgacattcccactagcagtgtatgagaattccagttactccatatccctcccaacatttagtatggtcttttgtaattgtagccactctaataggtatgtagtggaatcttcttgtgattttaattcgccttttcctaatgactaatgatgttgaacaacttttcatatgcttatttgccacccacatatcttctttgaagtgtctattcaaatcatttgcccattttttattaggttattttcttattcttgagctttaaagcgtctttatttatgttgggtacagatcttcaattggatagatggtttgccagtgttttctctcggcatgtggcttgtcttttcatcctcttaagtgtcttttcaggagcagcagtttttaattttgacgaaattaatttatcagtttttctcttattattcatgtttttgctctcatgtctaaagtctttgcttgaactagtcacaaagtttttttttatattttctttgagaacttttatagttttaggctttatatttagacctatggtcaatcttgaattactttttagaaacaataattgcagctttaattttagatttaaggggtacatgtgcaggtttgttatgtgggtgtattgtgtgatgatgaggtttggggtatgactgatcccattgcctagttagtgagcacagtatccagtagtgtttcaacccttgctcccttccctccctcccccgccattcatccctggtatccaaatccagcagcacatcaaaaaggttatgtccatgagtacccagtgtttagctcccacttataagtaagaacatgtggtatttggttttctgttcctgtgttaatttgcttaggataatcacctaccgctgcattcacattgctgcaaaggacatgatttcattctttttaatggcaatatagtatcccatggtgtatatgtaccacattttctttatccagtccaccattgatgggcatgtaggttgattccttgtctttgttattaatgaatagtgctgtgatgaacatatgagtgcatgtggttttttttttttcttttggtagaacgatttattttcttttggaaagaaaataaatatattcagtaataggattgctgggttgaatggtacttctttgttaagttttttgggaaatctccaaacagcttttcacagtggctgaattaatttacattcccaccagcagtgtataggcattcccatttctccgaagacttgccagcatctgtttctttcttttcttttcttttctttctttctttttttaaataatagccatttgcctggagtgagatggtatctcatggtggttttgatttacgtttctgtgatgattagtgattttgagcattttttcatatgtttgttggttgcttgtatgtcttcttttgagaagtgtctgttcatgtcttttgcccattttttaatgtaattatttgttttttgttgttaagttccttatagaatctggatattagacctttgtcagatgcatagtttgtaaatattttctctcattctgtagggtgtctgtttactctgttgatagtttcttttgctgtgcaaaagcactttagattaattgggccctacttgtcaatttttgttttctttgcagttgcttttgaggacttttttttgcattttttgaggacttttttgtatatggtaaaaggtagggatccagtttcaatcttctgcatatggctagccagctatcccagcaccatttattgagtagggagtcctttctctcttatttttgttgactttgtcaaagatcagatagctaaagctgcatgtggctttatttttgggttctctcttctattccactggtctgtgtgtctgtttctgtatcagcactatgctgttttggttactgtagccttatggtatagtttgaagttgggtaatatgatcctctagctttgttcttttttcttaagattactttggctatttgggctctttttttattccatattaatcttagaatagtttttacccatcctgtgaaaaatgacattggtagtttgatagcaatagcattgaatctgtagattgttttgggcagcatggccatttttacaatattgattcttccaatctatgagcatggaacgttcttccatttgtgtgtatgtatcatctatgatttctttcattggtgttttgtagttctactggtagaaaaaagtcaaggaggagggactcctccctaactcattctgcaaagccagtattaccctgatgccaaaacctggcaaagacacagtgaaaaaagaaaactacaggccaacatccctgatgaacacagaggcaaaaatcctcaacaaaatactagcaaaccaaatccagcagcacatcaaagaggttaattcatcatgatcaggtaggcttcattcctgggaggcaaggttggttcaacatatgcaaaccaataaatgtgatttaccacataaaaaaattaaaaactggcccggtgcagtggctcacgcttgtaatcccagcactttgggaggctgaagcaggtggatcacgaggtcaggagatcgagaccatcctggctaacatggtgaaaccctgtctctactgaaaatacaaaaaattagccgggcgtggcggtgggcacctgtagtcccaggtactcgggaggctgaggcaggagaatggcgtgaacccaggaggcagagcttgcaagtgagctgagatcgcgccactgcactccagcctgggcaacagagcgaaactccatctcaaaaataaataaataaataaaataaataaataaaaacaaaaccatatgatcatctcaatagacgtggaaaaagctttcaataaaatccagtacgcttcatgttaaaaatcctgaacaaactagatattgaagggacatacctcaaaataataacagctatctatgacaaacctaaatacaatatcatattgaatgagcaaaagctggaagcattccccttgagaactggaacagacaaggattctcattcttgccactcttattcaacatagtactggagcagtcaggcaagagaaaaaatagaaggcatccaaattggaaaagaaggagtcaaactgtctttctttgccgatgataatgattctataccgagaaaaccctaaagactctgccaaagactccaggaattgataaacgacttcaggaagtttcaggatacaaaatcaatgtacagaaatcagtagcatttctatacaccaataacgttcaagctgagagccaaattaaaatgcagtcccatttacagtagctgcacacccacaaaatacttaggaatacatcaaattactttttgtgtgtagtattagacaaccagccacattctttgagctaaaaataaaaacatgcaagatattaaaaatacaaatagggactgaatagtacagtgaagaaaattacaagtagaacataagggaatagtcaagaattgtaggaaaaaataaaaatataagtacagactagatttctcatgtttaggaaattagactttttaaataaataaaaaattgccaggcatggtggcttgcaccaataattccagccacttgggaggctgaggtgggaggatctcttgaggccaagaatttaagaccagtctgggcaacatagtgagactctgtctccaaaaaaaaaaataataattactgggtgtggtggtgtgcacttacagtttctgctactcaggaggctgaggtgggaggatggcttgagctcaggagtttgaggccgcagtgagctatgatcacaccactgtactccagcctggatgacagagcgagacccgctttgtatgtatgtgtgtatatgtaatacacatgtatacgtgtatatatatgtataaaatgttctacttcaaggaagatgattacatgaaggtatataagaaccaccaccaccaaccaccctctacaagaagggaagagtaaaaatcatatcatggtaggaattgtatggaaaaactggaaagtcagaatggaataggtagtacattgctaaatttgttgattgttttagaatgcttctggaacacttcttcaagagtattcatggggaaaaatgagagtcgtgggtaggtaggtgaaaaaccagttgtcattcatgaaatgttggatgaatcaaataaatgagggcttttaatttactaaagaaaaagattgctgttcttcaaaaagaagtaatgtgatctatgaatagagtttagactcaattgaactattctgcttcaatcaagaaaatatttgacaatatgaaaagtgagagatgaagaacattttaatatctagtttttacttttatattacttgcattttaaacatctatttgaaaatgttaataaattagcaatttcaaaaaaatttaaaattatcatttgatttattccctcagaactttgagacaggagagtactatgagtgacttctcatagctaggtataattaaatgcaggggcaagcaactggctattctatgcactgttacaattagtgataggccatccctggcagagtcttagcatgtcttgtaacttgtttgaaaaataaacccttcctcttcattcatatctttattgagactcataatttacttgatacttaccatggctcaagtgctggacttatattcacagaatttaactaatcatggcacttgattcatgatactctctcattattaatttatgcatggccttctttattttgtaggcattgaatcattcattaattcattttaaataatattataagcacttatagtaccagcatgagaacaaggatactgagaataatttccttctactgtgagttccttccccattccatctcctggccttgtgtttcctttcctccttctccctgtaggcagccactcattatgaattacacattacacacttccctgcctttcagaaatgtatggttttattacatacatgtatttctatagattatatttttagttttggatttataattagggtctcatgctctgtgtctgaaagttgtgggacaatatcaaatgttctaacatgtgagtaagtgaaatatcagaaagagaagagaaagagccgactaaaaaaatatgcagagaaaatggctgagaattttccaaaatcagtgaaagatagaaagttgggaagggtaggagaaagggtggggaaggaagaaatttgttaaaggatataaaattacagctagataagagaaatacattctaatgttctatagcactgtaggattactatagttaacaataatacataatttcaaatagctggaaggagaacattgaatgttcccatcacaaagaaatgacaaatgtttgagataatgggtatgctaattaccctgatctgatcactatgcatcgtatgtatcaaaatatcacagtgcgccccatgaatatgtacaattattatgtgtcagttaacaaagttaaaaaaatgttcagagaaccccaagcagggtaaaggtagggagagaaagcatacctctagatgcattatagttaaactactgaccaacaataaagagaaattcttaaagaagctagataaagaaaggcagccggattaaaacaaaatgtatgtacagaggaataaagataaaaattatagcacaattcttatataacctatgcacgcagaagacagtggagtgacatcaagtgctgagagaaaacaaaacaaacctgccaacctgggatcctatacccaataacaatatctttcaaaactaaaggcaaaacaaagactttttagacaaacaagagctgggaaaattcattgctagttaacctgcactacaagagatggaggaagtgtgttgggcagaaggtgtatggtaccaggtgacatttggatctccacaaagaaatatagagtacctgcagtaatgtaaaagccatcgaatgtaaagacattgcatgtctaaagccaaaacaatgcaaatatattatgagatttagaacatgtaggaataaagcatatgacaataatagcacaaatcatagacaggacatggaaatgtaaaatgttatttagaggtagactatggtaagtaaaaatgtgtattgtaaaccctagagcaacccctaaggaaaaaaagaaagaaaagagttaaaataatctaggaggggagataaaaattgaatcataagaagaaggcaagaaaagaggaaaacaggaacaaaatacagacaaaagcaggttcagtgttattaagatggcagttctggtcctggcttggtggctcacgcctgtatcccagcactttgggagtctgagccgggaggatcacttgagcccaggagttcaagaccagcctgggcaacatggtgagaccctgtctctacaaaaaaaattttaaaaattagctgggcacagtggcatgcacctctcttcccagctacttgagagtctgaggtgagagaattgcttgagcccagtaggccaaggctgcagtgagccatgatctcatcactatactccagcctgggcaacagagagaccctgtgcgaaaaacaaaaaggtggcaattcttcccatattgatccatattgatctatagatttactgcagtcccttttgaaatccaagcagaataggcaacacaattttgaaaacagaacagagagaacttagactggtttgaccacttcctgtagagctgttgtcatcaacatggtgctacactggcataaagaacatagataatggagcagaatatggaggggagaaatcctcacatttacagtaattgatttttgaaaaaatgccaagacaatttagtgggggaaatgataggaatttcaacaaaatgatgctagaaaaattgaatgtccatatgcaaaaacaaagacaaaaacaaaccaaaatcccttagatatttatctcctaccatactcccagaataactcaaaattgatcataaatctgcatttgtgagctaaaactataacacttctggaagaaagcataagaaaaagtttttgtgaccttgggttaggcaaagaattcttagctatgacaccattaaagaaaaatattgataaattgggtttaatcaaaaatttaaaacttgtcctttaaagacaccactaagcaagtgcaaagacaaattatagactctgagaaaatatttgaaaatcacatatatgccaggtgcagtggctcatgcctgtaatcccagcattttgggaggctgaggtgggcagatcacgaggtcaggagatcaagaccatcttggctaacatggtgaaaccccgtctctactaaaaatacaaaatattagccgggcgtggtggcgggtgcctatagtctcagctactcgggaggctgaggcaggagaatgatgtgaacccgggaggcggagcttgcagtgagccgagatcatgccactgcactccagcctaggtgacagagcgagactctgtctcaaaaaaaaaaaaaaagaaaagaaaaaagaaaatcacatatataataaataacttgtatccagaacatataaagaactctatgaatattaagataccagtcctcctcaaattggccaaatatttgaatagccagttcactacagaagatacatgaatagctaataagcacatgaaaaaatgcttattattactcattagggaaatgcaaattaaaaccacagtgcgatgctacttcacacccaccaaaatggctaaaataaaaactcagaaaataagtatgttcaaggagaaacaggaattctgtgttgctgatgggaatctgaaaggtatagccacaacagaaggtggtttggcagtttttaaaaaagtcatactaaaacatatttaccatatgatctagctaattcacttacctgtatctacctaacagaagtatgcagattctttaagtacttcaattaaaagagatcatcaggtagggtgaaaaagcaagatccagctatacagtcagctgcccatatctgtgggttacagtcagctgtccatatctgcagggtttttttttttttttttgagatggagtcttgctctgtcacccaggctgcagtgcagtggcatgatctcggctcactgcaacgtccgcctcccaggttcaaatgattctcctgcctcagcctcctgagtagctgggattacaggcaaccgccactgctaatttttgtatttgtagtaaagacagggtttcaccatgttgtccatgctggtctggaacgtctgacctcaggtgatccacctgcctcggcctcccaaagtgctgggattacaggtgtgagccgccgtgcctggccatgtctgcaggttgcatctgggtattcaaccaactacgcctcaaaatatttggaaagaaagaaacaatgagaaataacaatacaacagtaaaaatacaaataaaaaccaatacagtataacaactatttacatagcatttacattgcattaggtcttataagtaatctagagatgatttaaactattcaggaggatgtgcataagtgctctgtagatactaccccattttatataagggacttgagcatcctaggattttgggatccgaggcgggtcctagatagaactcatggcttgtataccaacggatgactatctgttgtaaactggaaacttattttaaatgtgaagatataaatccttaaaggtaaaaagatagacaaatataatactgtataagcactaaccaaaagaaagctggaatgacttgattaatatctgataaaatagacttaacaaagattataaacaggcattaaaaaggtgtatttcataatgatcatggggttatttcaccatggaagcacaacattgttcttaaatattcatgtacttaacaacagagcagtaaaacataaaacaaaaacagaattgaaaagagaaatagattcacaattttagttgacggtttcaacactcctctctcagtaatttatagaaaaagtagacagaaaatccataaggatatagaaaaatctaagcaacactatcaaccaacttgacccagttggtgtttatgaatcagtctatccaacagcagcatacacattccctttaagtgtacgtgaactactcaaaacagtagatcatattctaggcaataaaacacatatcaacaaatcataaaagaactgagttattcaaagtgtgttttctgaccatgaaagaattaaagtaaaatttaataacagaaagataactggaaatctccaagtatttggaaatgaagcaacacatttctaaattactcataggtcaaggaagaaatctcaagggaaattagaagataattagaataggatgaaaatgaaagtagaatatatcaatatctgtgagatgcagttaaatcgatgcctagagggaattttataattttaaatggttacattagaaataatttaaattcattgatccaacttcttaagttagaaaagaagcaatgaagacaatacaatgtgtacataaggatagatgtacagatcaatgcaacaggatggtccagagatagacctgcacatacttagtgttgaaccaacaaaggtgccaagataatttaatggagaaaaagaaagaaggaagtcttttcaacaagtaataccagaacaatgaaatattatacagaaaaaaaagaactttgatttctaccttgtactctacacaaaaattaacctgaaatggatattagaccatatttgtgtttacacaaaagcgaaaacttttaaacttgtgaaagaaaatatagcttacagtcttcatgaccttgaggcatgaaagacttcttaggacagactgtccatcaaagaaatgtcaataaattggaactcatcaactaagcacctctgctctaagaaggactccctgaagaaaatgaagagctgaggtgctcactgggagaaaatcttagcatcacataaatctgacataggacttatttctggactaaataaagaagttgtacaactgaataatacaactcaattaaaaggtagaaaaaacatttgtctacacacctctaaaaagaagagaggaggattccaataatcatgtacaaacatgctcaacgtcattattcattagggaaatgcaaattaaaatacaaagtacaataaaatactactacacacccaacagagtggccaaaatttaaaaagacttacaacccaagtgttgacaaggatgtggaacaactggaactatcatacattgttggtgggattgtaaaatggtagaaccagtttgtaatatagttcatcagtttttaataatgttaaatatgattttccatatgaccaacaatttcacttcctggtgtttacctgtgaaaaatgaaaacgcatgcccataaaaagacttatacatagatatttaaagcacctttatttatagaaacaacccaaatgtctgtcaacagatggctgggtaaacaaattgtggaatattcatacaatggcatgctgtttggcattagaaaggaacgaaatacttatgcacatagcaatatggatgaagctgtctcatgtcaaacaaaagaagccagacacaacagacaacatagtgtgtaattttattttatataaaattctagaactggagcatgaatctatgttattagaaagcaggtcaatagttgcctggattctagaatatggggagattgattttaaaggggtgctttttggggcaatggaaatatcctgtatcttaagatagtagttacataggtgtatatgtttgtcaaaagcacatttaacaatatactttctttttgtttttggagacagagtctcattctgtcccccaagctggagtgcagtagcacaatcttgggtcactgcaacatctgcctcctgggttcaagtgattctcctgcctcagcctctctagtagctgggactacagacacgcacaaccacacccagctaatttttgtatttttagtagaggcggggttttaccatgtgggccagaatggtcttgaactcctgacctcagatgattcactcgcctcggcctcccaaagtggtgggattacaggcgtgaggcacctcgcctacctaacaatatactttaagtgtgcatttaattgtatataaatttgcctcaatttgttttaaaaagtaaaaaaaaaagtaatgctaaattattgttcactcccaccatcagtggataatagagattcaattttctactttttccatttggataatcacttttggggttcagttactgaataatccatcctttccccatttttctgacttgctacttctattatatgtcaaagttgaatgtatgtgtggttcagtttctgcactgtcttccatttccttgattagtttgtttatcctgtctttattattttaactttgtaataagccccagtatctttattctctttcttcagaagtgttttggctattattgatcctgtattttttgtataaattttagaaatagcttatttatttctatgttctatgaaaaaccctattggaatgttaatggggattatattgatgtcatagataaatttgggtagacttcaaacttttacagtattaaatttctctgtttatcactgtggtatatcttcctatttatttagatcctctttaatgtctcccaatacaatttgtaatttttcccatcaagttcttgcacatattttgaaagaataatttcaaagtatttgatgttttttattttattgcaagctaagtcttttaattatgttttgtgctgtattgttgcagtatagaaatatgattttaaaaatattaatatatctagggaacttttgcacttgttttagaaagaagctcatttattgatgagcagaatttgtggtgggggggcacaggcatgtgtggtgtgtacgtgtagggtgtgtgctgtgtgcatgtgtttgtgcgtgcagacacatttgtgaatattttggagagcagatatattgagggtgggttttcaaaaccctgaagttattttctgcagttgagtttctgcgtgttaaggttggccctgtgttgcaggaggggatggtggctaaggccatgaagtttctggcttttaggctggtctgcatttcacgcagttgtggcaagaagggtctcttgtaaagctgatatgaagtcaagacatccgtatctcttccatcctggggatggttactcacgatgtaggctgtattgttaaaaatgtgtcactcttcccttccagtatccggagtgtgatgcagaagtaccttgcagagagaaatgaaataacctttgacaagattttcaatcagaaaattggtaagtcctgcttgttcatttggcatacggtaattttagtgatgaaattgggcgatactatagtaatatatgaatgcaccccctagtgctttatatcctctatagctgtggctgggaataaaggaaatttcatgtaattaataaggtatttaatgatgacttacattcctagtaacatattctatgattaagctcttgggaaatgggtaattctaggatttttacatgaactcagcgttgctgaatgtaagagaataggatattcctttcttttctttgcgtcttgcctgcctcgtggttactgaggtggtttgctggggagctgtgtgtaatagctttaaaattattttatggctggaggaaattactttatgaaaattccaagaaattaaagttccctagaactcaatttgtgctctgtttccatgattaatagacatagactgatagatccctttaagactgcgtattcttcgagataattctgggcttgcccttttgtttgctgatgaggagatgtagacacagggaggtggagtgacttgttctgattcccagttctccttcttctttactccgataataaaatattaaccagtaaataataaaatagttaccagtagaagctggtgcagaaatctttggatttttgtaaaccactttatctgttttacgaaaattagcctgtctgtgaagaggttctttggtagatacagtttctttgatcacgcatgaagtacagtggggaaaaggtggacggagtggtttggagaagcagatgacattggtctgtctgtgcctgagcactgtgtggaaagtgattggtctttgccatatagagatatttcatcctgctcctcaggagttggttggggaacagataagttaaaagagtttggctttcattttgttagttcttacggcttctcattactttcatggtgtgtggttactataagctacacagatgttctcctttgcttctgattttgtgctaaaaaacaaaataaaactcatgataacaagagagagaaactctgtatctctgagagtggagggaaaaaggaattatctttttatttgctagttaaaaatttttttaatttattttttgtggatttattgaggtatatttcacatagcatacaatccacacattgaaagtaaacagttgagtgactttttgtgtattcaccgtcatacaaccatctgcactgcctaattttagaatgtttttatcaccccaaaaagaacttgtacccattagcagtccttctgccttctaccctccctcagctcccggcaaccacgaattgagtttctgcctccatggatttgcttgtgttggacacgccacatgaagggaatcacacactgtgtgtccttttgcactgggcttcttcagcataaggccttcaaggttcgttctggtggttgtatggatcagaacttcagcctgctttcccttcagctctcattccagtttctgaaatgcatccaggattcttcttttgtgttttctgttctctctcccttctgtagctcctttcctgtctacagtccccgcaaacatacatacagccccccaaacatgtattttccatagcctggattaaaaccttaactgaccctggcaccgggagactctgacctgagctcccaatggcattagtgtggctgagtatctcagttgcacggattgttctctgagagcagtctcactgggcgctgatgggctgtgcattttatctgaagctgttaaacattgtttaaataaataatttcttctgttcccttcaattcgtgaccttggatctggtcaggagaagctgagtttgagcttgggaaggtcatggtcacaggaaagaagagcagctgatcggaggcttagggagagcgcacaccaccatctgtaattacgttttgacggagctgtctagtgttgttggcctgctccccgtttttctctgtagtagtctcactttctgcctggtctcaggcattgggggagagtggaaggtgggccatggtgggagtaaatgtgtctgacactccaggtcttccttttccaggttccgtttgcgccttccatcactgactccatgcgttcctgccctactctttcccttctccatctttccttccctctcccctcattgttttgctggtcctcttgttttgtttcaccctctgtctgcctacccatctgttccttttccctctttccttacctcccaaggtccccgacacacaggatcaccacagggcttgggaactgccctccaatgtgtgctgtaggcaattggtaaaaatgttttcaaaatgaaaaccatagaagtctttaatttacttggcctctgaggcattgccgaactgggagattgtttggctacaccctgaagtggttgttatttcattaatttttatctataaaagtagggataataatagttcaggtccgtgaggctgttgagagggtttagctggtaatacacatgaagcccttaacacgacaattggctctcagcagatgctcagtgaatagaagcaaattgtttatgttaaaaattttcaacacacagaaaagtagactagaataattaaccccatatgtatgtatatgtatgtgtttgtgtgtgtgtgtgtatatatatatatttacatcacctagatttgatacatttcaccattttgctatactttgttttcccatcccgtctttttttgtggttactgaattaacaaagcagtcacagcgttttgtgctatatgcatctctaaaaagtatgcatgctttcttatacagccgcagtacctttatcccaaacgtgaaatttatcatgattcttagtgtactctaataccgagtttattgtcaaatttctctgattaacttaaaaatgtttttttttttactcttggtttgaatcagtattcaaatactgttcttgtattgtaattgatgataatatttcttgtaatctagaccagttcccccacattgcccccgccagcacatgcacaggtaattaacttaccgaagaaattgggtcctgtgtgttgtagaatgttccacgttctgggcttttctgtctgcttcttaatggtatcatttaaaaaatttttatttatttattttttgggacagagtcttgctctgtcactcaggctggagtgcagtggcacaatctctgctcactgcaacttctgcctcccaggttcaagcagttgttgtgcctcagcctcctgagtggctgggattacaggtgtgcaccaccatacccagctaattttttttttttttttcagtagagacacggtttcactatgttggccaggctggtctcaaactcctggtctcaagtgatctgcccacctcagcctcccaaagtgctaggattacaagcgtgagccaccatgcccggcctttaatggtatcatttaaattgtacttctgtttcctacatttcctgtaaactgagactttgctctaacagcttaatgaggtttagcttcagctgctttttggtaggagcactttataggtggtgctgtgtacgtcgtagcaggaggcacatgccatttagggtctctgtagtcaggtctctaaagtgggctcagatgtggtcggtgtcagtttctcattgacaatcattgtctaaatcagttattttattagggatcaacttaactaatgttaagacacataatttctatataaggatgaggataaaagtagctggcacttaacccctttcttcttaatagtggcaattaaaaacaaagaatgaagtttattagggagttacaaaatggtgagttttctaaatacaagattccttctgcattgattacttttattcctcaatgggaggatatttagttgcctttaaatatattttaattagaaaggtacgtgttcatggtgcagcctcatgacccttgcctcgtggtgttgcccccatgcgtaacatggctaaaagagattctgcaggtggaattaagatgattgtccgagtgggcttaatctactcacatgtgctctttaaaagcagagtttcctcaggccagcagcaaggaggaagtcagaaagatatgaagctcaggaaagattccacactgttgctagctctgcagatggagggcgtgtgggtgctcactaggagctgagagtggccctggctggcagcagcgaggaaacagccacctccatcccaaaccacaaagcacagaattccatccataactggaatgggtttggaggcagattcctacttggagcctgtagataagaacccgggctgaccgacaccttgaatttgtcctggtgagaccctaagcagagaatccagtggaacccactcacacttctgacctatagaactgtgagatgatacgtgggtgttgttttccagtcactaagtttctggtgacttttgacacatgagaaaactaatacagcaggcgaaatctccatttgttgtttttaattgccactattcagaataaaggggttatgtgccagttacttttatccttatccttatatagaaattttatcttaagaaatattaagttgatccctaacttgctgccagtaaaacttacacatttagacattgacacagtatgtttggttttaaggggatactggttattgaatagacaggaaaatcattgtatcagttatagttaagattcttttgtgactatttttcttctttaagatacattgaaattgtaatttcatcatatgaagtgaggcacatggcatttgataaagtccatctgtctgtggacaatctacttagcttctctgtctgcaagttcactcctgttagaggagcatgtttgaaactataagaagactccaaaacagatcctttttttttttttttaagacagtcttgccctgttgcccaggctggagtacagtggtacaatcttggctcactgcaacctctgcctcacaggttcaagcaatgctcttgcctcagcctcccaagtagctgggattacagtcatgtgccaccatgcccagctaatttttgtatttttagtagagatggggttttgccacgttggccaggctggtctcaagctcctgaccttgtgatctgcccgcctgggcctcccaaagtgctgtgattacaggcttgagccaatgtgcccagcccccaaatcgatacttaatacatgaagtatgtaaatgtcattctcatgtataaagaacgtggtaatataatattatatcacatactgccattaaaggcatttcattttataatactggcttcagaactcaatccccagtttgaatagtaatctttttcaatttgtgtgaaataatttggtgtctgatatatagacacaaaaactttgcaatttttacttttttttttttttttttttgagacagagtcttgctctgtcacccaggctggggtgcagtggtgcgattttggctcactgccatctctgccttcccagttcaatcacatctcctgcctcagcctcccgagtagctgggattacaggcacacgccaccatgcctggctaatttttgtatttttttttaaggagacacagggtttcaccatgttggccaggctagtctcaaactcttgaccttgtgatccacccacctcggcctcccaaagtgctgggattacaggcgtgagccacctcacccagccctgcaatttttactttttaaaaaatgacttgtccaggtgtggtggctcatacctgtaatcccaacactttggaagtctgaggcaggaggatcacttgaggccagacgtttgagaccagcctgggcaacacagtgagaccctatctgtatagaaatttaagaataaaattagctggatgtggtgctgcatacctgtagtcccagctactcaggaggctgaggtgggagggtttcttaagccttggatttcgaggccttagtgagtcgtgatcgcatcacggctgtccagcttgggcaaaagaacgagactctgtctcaaaaaacaactctcaaaatgcaaaactactatataccattcacccattgtaaatgtattatgtgatgattttggtaaatttctacagttgtgcccccgtcaccacaatacaatttaaaaacatttccatgcctccaaaagatccctcctgcccatttgtcgttactctgctcccatcctcagccccagacaaacactcatctgtctgtttctatctgccttttctagacatttcataaaaatggaattatacggtataaagtctgtagtctcttgcatctggcttctttaacttagcataaggtttctgaagttaatccatgtcgttgtgtgtatctgtacttcattcctttttgttgctaaatagcattccatattatggacagagcacactttttttttgttttttgttttgagatagagccttgctgtgctacccaagctggagtgcagtagctcgatctctgttcactgcaacctccgcctcctgggttcaaatgattctcgtgcctcagcctcctgagtagctgggattacaggtgcatgccaccacacccagctaatttttgtatttttagtagagacaaggtctcactatgttgcccaggctggtctcgaactcctgacctcaagccatctactcacctcagtctcccaaagtgccgggattacaggcatgagccacggtgtccggcctacagagcacactcacttcattcagcagttgatgggcatttggattatttccactttttgcctgtttatagagcagttattgccactttttgcttgtttatagagcaatgctaccataaacatttgtgtacaagtattttatggacatatgttttcatttctcttgagtctttacctaggagtggaattgctgggttgtatggcaaatttgtgtttaactttttaagaaattaccaaattgcttttcaaagtggctgtactgttttacattcccaccatcaatttatgagcattccaggtttactatatcctcaccaatacttgttgttacccgtcttttttgtatccatttgaatggataggaagtggtatcttgttgtggtcttgatttgtgattctccagtagttaatgatattaaacatgtttgtgctaattagttatttgtatatcttctttagtaaaatgtctacttaaatcttttacccatcctgaaatttggattgtctttatgttatttgttgtttatgtatgatttacaaatgttttcttctggttggtggctggaatccagtctctttcattttcctaatggtgacttttgaagcacaggttttatttttgaagtccaatttatacatttttttcttttatgactcatagtttagtgtctttttttttttttttttttgagatggagtctcactctgtcactcaggctggagtacagtggtgcaatctgggctcactgaaacctccacctaccaggttcaagtgattctcctgtctcagcctccagagtagctgggattacaggagcacaccaccacacccagctaattttttatatttcagtagagacgggttttcaccacatggcccaggctggtcacgatctcttgagctcaggcaatccacccgcctcggcctcccaaagtgctaggattacaggtgtgagccaccaagcccggcctttagtgtcatatttaagagctttttgcctaacaaatttgcaaaggttttcttctgtttttcttctagtagttttattgttttagctcttatatcttggtctgtggtcgaatttgagtatatttttgtctgtggtgtaaagcaaggtctaaatctatcttttttgcatgtggatatccgattttgtgtttctcattaaatttgttcccaagtattttaatctttttgatgctattgtgaatggaattgttttatttattttaattttggttgttcattgcaagtacatggaaatagaatgagtttttttgtagtgatcttgtatccagtgatcttcctgaattagtttatcagttctagtaaggtatgtctgcatgtgtgtgtgtgtttgtgtgtgtgtgtgtattccttagaattttttatgtattgaatcctatctgaataaaaagagttttacttctttgtttccagtctggtgtcttttatttcctttcagtttttacttttcactttaatttcttaaatgttttttaagttggtctcaaacatatttagcatgatatcaaagaacatttacctagaaataatacataaattatatttgacatttagggccaaggcataagaaatgtacttgctgtgggctttgaaagcaaagtgtatgtttcattataaaaagaatacattgataaaaacagaaactactacctctaaaagttaaaaaaaaaaaaaatctgagcagtttctataataataaagatggatgtagatagaccacagatgcttattttaaaaatttggtaattattaaaaaaaaccccaaaatactaaaaaacaaactaaaacattttaggatcacttttttgtcagtttcaatgaataaacttgccactcgatttcatcatttgtaaaattattgcttgacatgtttaatatctaaaatataacatagatggttaaaagctgaaaacatgtataagtcagcagctttggattcaaaagttgaggttaaattacagcaaatagagccgtcttgcataaggttgtagagagggaactgttatcctgggaaccaacttcaactttgttttcctctgtgttcctacctttgtttggaagtgtttgtttctgtcacagtgaagggcctcccctgacagatcccctgattgacagtgacacagtcagttcccaccctgccttatctgtaagagttctctagccagagcaaccacagcctcagagaagaaaaacctggggccctattcaattctgcatccattatccatgcctttgtggagacttttcctgagggaaagagttaaagaggcacgtaaactttcaaacagcagagaccaacagtggactaagcacagcgaattggattttctgttgaagaggcagtgcagtggccgggttcaggcagtaacgggagcctgggggacttagggtcacagcctctgcacagtttcaacttgggtttcctaataaaaatgctgcccagagaggaaagacactagggtagaggaaaagctgtttcttacaaacctactggcaagtccgtcttcttttcagctgacttcatcacctgtgttggactaaacaagtctgggcatcagctcctggtgctggagtctgcctgggctgggagccgccacatgcccccgcagtgcagcctctgcagctctgaacatttgggacatctgagcattttgggttaaaaaggataaaaagaggagaaaaaggctaaaccagttctatgggaaaatttggttgtcttctttttttttttttaaacccagcttagtagggctggttttccttcttaaaattatcattcaagttcaaagaccagccataattatcatcgccccacccaaaaaaaaattcagaaaagctacattttactggaaaagcacaatcctttaatatctactaatcactagaaactataggagcactgatttgccagctagcaaatgtattatcttttttttaatgttatttatttattttttgagacgggtctcattctgtggcccaggctggaatgcagtggtacactctcagctcactgcagcctcaacctcctgggctcaagcagtcctcctgcctcagcctcccgagtagctaggactacaggcacaggcatgcgccaacatgcctggctaatttttgtattttttgtagagataaggatttgccatgttgcccaggctgatcttggactcctgggctcaagagatccacccacctcagcctcccaaagtgtcgggattataggtgtgagccactgtgctcggccatctattatctgctaaatttttactgcttaattttcccagagctcttctgagtgtgtgattggaatactattagtccataattggatttactattagtttaagacagtgatgctacctgtgtactagacacttcagtgagtattttatgtgctggtaaaatatgatcaagcttgcacaactcccaggtggcagagccagagttggaagtcatgtgctttttctgcctataaccagcaaaatttagtgtggaaattagcatgcatatgaagttctttaaaaaaatgacatatcaactgtataatttttatttcctatataataatactaaaatccaggatttggcagctgtgcacaaagatctctctgtagctggtctactttatgtgctttgctgaaggggacattcaatcaaatatatttgagtccttcactgggaatgtctctttaaacaaaaaggcacatggagaagactaagacagaaggctcccatccctaaccagctcaccctgcaaaagatggacagcaaaatgtgtgtggaagtgcacagacctctgacattccagtactgaacagttgttaagtgtgtttactatcgccaagcagcccctgagattcccagaagagcctactggtcattttcctgaggcacgaatttaaatcctaaagcaaacgtggggaagttattctcttagccaagaggtaagccttgctgatcagccagcctctgcagctaaactcaactttgtagctctctctctgccagtgtccacgtattttcggaaaaaaaaattatatgctctgtcaatattagcaaatgtgggatcttaatttatgttgctagagaatgccaaggacctatgaaacagcacctctgctggaaaagttctctgtaaactttttgaactgacagtgggggacgatggggctgttttaggattttaagagccctcaattggttttgaaattcaaggtggtgctgcattgtcataatatcttctggttttagatttttttggagatagcttttctgatggttttacaccttgtctttgatttattttagtatttctacttctagtcaaagttaaaaccaggaaatacagagatgtgctgtgggggtgatggttaagctttgtttgaaacttgttgctcaacattcagttgttcgtttaataaatttaactatgtgccatacctttctcctaagcactggggaatcccttagggaacaaaagcagaaatccacacccttatggagttaactcctccttctcgggggagaaagatccacaaatacatactgtccacaagggggtaaatctcaaggagggtagaagagctgcgaagagaggcagggagtgctcgtgcacatggtggctttaaacagggtgttttaagaaggtgccattcataaggacaattgagcaaagtcctctgggagaggaggggccgagcccctgtggatttatctgggggaagagtacccaggtgaagtgttgagcagggcaaagaccctaaggctggaacctcagggttgaggcacagcaaggaggccagggggctgcagggcagggagtacagtgggagttggggtgagggtggagagtggccaggcccttgaggcccttgtgagggtttctgctcttacccagagtgaggtgggacatagggaagtttgagagttgggatggcataatctgactcaagtgctcctggatcagtctggccgatggggaggcatgggccagggaggttgtgttagtcctgtctcacactgctgtaaaggactgcttgagactgagtaacttatgaagaaaagaggtttaattgactcacatttccacaggcctaagaggaagcatgactgggaggcctcaggaaacttacagtcatggcagaaggcaaaggggatgcaagcaccttcttcacatggcggcaggagagagagggagggagagagagagagagagagaaagagagagaggcgaggtgccacacgctgttaaaccatcagatcttgtggcaactcactctcatgagaacagcaaggaggaaatccgtgcccatgacccagtcaccttccaccaggcccctccttcaacattggggattataattcaacatgggatttgggcatggacatacatccaaaacatttcagagacctcttagaaagctaaaggctgtgagagacgatgctggcctttagaccattggggttgccgtggaagtagagagaagtcatggaattcccagttttgaagatagagtcaatagatttgtaagaaattatgttgcagtacaaaaaagggttgtggggagaagtggtttgctggggacacttgtcctcaggtctaaagataaaggagaggttttgataagaggttgagactgtagggcgatgatgttgtttatgcctcttggaattaaagtaacttgatttgcacagtgggccatttgctggagtattgtcacacctcctttgcattctagctggtgctttgaggtcagcattaagctaagagctttgtcctgaggctgatagctttttgctagatgaacagagaagattcttacgggtgtgaatcaggagtgaaatcccagctgggacagagagagtccttctaggcccccagagagtctgtttataacattggagcacaaaaagagaaactaggacaactttttaaagaagcacatattcttaccttatacgatgcacttactctccaaagaaatatatatttttttagtttaaatcattgtcagcctttggaatttgctctttaggaattcatttccttgtcttaaaattatggctatttaagaagattgaaattagttgtttttggcttctgcttttcagccagcagttgagttccgaattggtgacagaaaagaacttgaaatggaatagcttgctgggaatagtgattttggccctttctctcagtgttgccttttagtttattttcagaatatacccgatttcctattcatgaggtaccaaatacaagaatccaatgttatttttttctcgtttactaataaatgtgctctgtacttgtattcttactttttaaaacaatttaattgatgtaaatatgcatttccataatatgcatttccataacttcagaaagcatagtcttgccctttgggttcaacccaccccagccctgggcagccactgatctgctttcagtcacaatagattacattcaccttttctagaacttcatataaatggattcaaacagtacatgctcttttgtgtctgatttatgtggctcagcataatattcttgagattcttccatattgtggctcctgttatcaggattgcttttctttttttttgagatggagtctcactttgttgcccaggctggagtgcaatggcttgatctcggctccatgcaacctctgcctcctgggttcaagcgattctcgtacctcagcctcctgagtagctgggactacaggcacttgccaccacgcctggctaatgtatttttagtagagatgaggtttcgccatgttggccaggctggtcttgaactcctgacctcaggtgatccacctgccttggcctcccaaagtgctgggattacaggcgtgagccaacatgcccagccaggattttgtttcttttttttgctgaatattattttacgtgcatttaacacagttcacttatctgtggacactggaattgtttccagtgtggggcaaatatgaataaagctgccacaggcatttctgcacaagccctgtgaacatacactatcatttctctttggtaaatacctggaagaggaattgctggatcgtgtctgataggtgcacacacattacgtttgcgatgtctttttgaggagttgacttatttatatcacagtgaaatgtcttttatcctggcaatatattgctctggtgtctactttgtctaatattgatttagtcactccagctttctgatgttagtgtttgcatggtacatctcttctccattctttgatttcaaagtgtctctatttaaagtgtgtttgttacaggcagaatctgcttgagactgctttttaaacccagactaacaatccctgttatttcattagaatgtttagatcatttacaattagttatcaaaacagttggagtgaagtctcccatccttctaactgttttctgtttgttcttttttctccttttcctgttgtcttttgaattgaatatactttggtatgttaggttattgccacactggcttattagctgtacctcttcatttttttttttttttggtgtttccaggaacctctgcatccctgaactcttgatgccctcacctcagcaagaccaccaaggtctgcttgggtgtccctcctagcgctgcagttcagtgcagttgaccactgtcctaaggtacctctaggccaagagccagctcatcctgggatcctcctagtttattttccttctctgaaagaccgcaaccctttccatgtctgaaaacagttatttcatagaacttttctctctagcttcctggctggtcatggtgagagattaagtctggtccttattattgtattatgcccttgaagtataatttcatttttgaaatatttggctcttggtgagaaaatttgataaatacttgaaactgagactccctgtaaaatcctagacatatagcgcctttgttataacttcatggtgcaacacaaacatgatggttggcttccaggttacccataacagcacaggtaagtctaagaagctttagaaaaggctgtatccatacagtttgggtcatgataacagttaatgagccccttggtgctcagtgctctacatacgtgatctcatttagtcttcagaatgaccctgtgcagatcattcttggcccccttttacaggcaaggagccgagcctcagaggtgaagggatttgcctggtgtcttgcacatagtgatgggctgaggtggagtctaccacactccaagctaaagcttttgaccactatactaagctgagtaaggagtttttgttgtcgttgttttcgataaagggtcttgctctgttgcccaagctggagtttagtggcgtgatcatagctcactgctgcctcgaactcctggactcatgtgatcttcccatctcagcctccagggtagctaggactacaggtgcacacgatcatacctggctagttttttttttttttttttttttttgtagagataggatctggctgttgcccaggctggtttcgaactcctggcttcaagtgatcctcctaccctagcctcccaaaatgctgggattatgagccactgagccagaccaaactaagtatttgaaatgtcttaaggggcagcagcaggttaggtggtgctggaacatctatgaagtggttggtttcttcctgaggtagctacttgttgccaggagaaagcattatgattcatttctcacagaaagtggttccctctcccccttctctcttcctttactctctcctgctcctcacattccttcctttactcttcctttcctttgtcttttttgtgtgtgtgtgtgtgtgtgtgtgtgtgtgtgtgtgtgtgtgtgtgtgtgtggttttaaggagtggagagtttaataggcaagaaggaagggagaaggaagaagctcccctgtacagagacagagggaggggcgcttcaaagccaagagagggaaccccaaatggggcggaaaccagccaggtgtatatatagagaggctggagaaggcagtgtctgttttgcacagggctcgggattggtttgaccaggcctgtctttcacatagcccgcgaaaaagctggccctcccaccctagccttttaatatgcaaatgcagggcaccatgatgttctgcacacgtggggatatgtgagggccattaggttgccaggaacatgttgggcaagggcaagaagtcccgcagggattgtggggattgtcgtgttgggtggacctagtttctaattgcctgcatttgcatatcaaaggttgccagcccggctctaagagcaggggctttacaagaagcttttcccaagaggctttaaaaaatgaaaacttcccaaaacttttcctccttgtctgcctaaaatactttcttaataactcctacaacattcctcccagtggagacgccccactagctgctgttaggaggttttgggcgacaactctttctggctacttcctgcagaaaaggggtgttgaatggggaacagcagctaggcctcctcctggagtccatctaagggtcctcagaagaatggcgtgtccttgtgtggttcagttgacagcaccgtttggagtttgattgctgctaggcaagaagaaacaatttgagttgtagtattgagtatacagagtccaaatatcaatacaagacatatcagtaagagggggcttaataaaggggttaacgaattccatcaagaagactggaatttattaaagagggattgtagccactcgggactgaagccagcattttccttgagcctgtcaataattttgatttgatctttaagtacctgtagattttcctttactatactagaggtgttcatccaaaagcagcatgtttcatttaaaagtgcgtcactagacccaataaaaagtcctagcagacttagtgatagtaaaactttcatgcttcctttttgttagtaactattatccctgctatagagatagtagagtgaggacagcaattcccacaagtgtggtgtggtaggtaatttccatctaaaattttacttgccaacatatagaattcccctttgggggtctgtgaagttccttggttttattttcccaaacaaagaaacctctgggttatgggcaccttactcactttcattacctggcagaatttgcaagataattgcccagaactagtatattgattcacatgtttacgttacccatccctattttttctttttttcaagctgcagaagatcaccatttgattcacaggaataggcagagttagtctaaaatgtaggcaaaaagcttaaaaacaattagtgagactaggatttaatgacaaatatatgataacctttggagcaaaatttttctctccagtcctcatttttggtaaaaactaattatgaataaactttagtcttatacttggcctgattatttgcataaagggcagcaagaatggttatttttacatggaccttttggattagctttgatgaaactctattccacaaggaatcttagacaagacccttaaagttgagcccagccatgggtttgtatcctcaaatacctgtgagttgggtgatcctctcctcttgaggtcccaagataaactgggagctcccagacctgttagaaagtgacattctttactgaccacaggttaggaaccctgtgcagagactatagacaaggtatggggccagttctccccaaggggcttttattggctctacatgttaagcttgattccttaaagggaaacacactgtttcagttaaagccttggtaaaataaccagtttttccaactgtgtcctgttggcatcctttgccttttttttctttaaacccctcctctctttgtcaaaatagcaataagatccccagcagaagagaatgaaatcaaaactgaccccacttgaattcatgaaaccacagaatgttaggcctaagtgaaacctcagagtctatgcattccagccccttcatttgattgatgacgaaactaaggaacactggcagagaagtgagttggtagaaccatgcagcttgtcggtgtgcagcaggtcctggaatgcagggaacactgaccttgggcgggatgcggggatcagctccctcagcgtctgagggtatcagccagatcatagcgtttgctgtgcagtgggatcgtgaagagccaggacctgaaggagaccgagtagcgcttacataggttagttgtttaggggacatttctttgaggatgtgatcaggggatcatgtggagcagcgtcgtcatcagccagggcaagagggagtgcagtgtgtttcagaaactgccagaaggcccacgcaggcagctcctgatgagagaaaagaggggaggcagggaactgcgcaggagccagggttttgagtgtgatgggaagctctggtgggtcttgaccaggcccgatgtatgttttaagatcattctagcctctttatgaagaatgaattgctgggatcagagtgggagcatggaaacaggaagaagaatctggagacccctgtcgcatttaggaagtcgccaaaggtggcttttgttagagtaagagcagcagagatgtaagaatgggtggcctgggacatattctggagccagaactgaatagggaagagaagactcaaggagtagttcaatgccatagtttgggggtaagtgtatacatagtttctgtaatttaggggaataaatacattctataaagcatattttcttttgtttttgttttttgagatagggtctcactctgtcacccaggctggagggcggtggcgcgatcttggctcactgcaacctttgcctcccggggtcaagtgattctccagcctcagtctcctgagtagctgaaaacacaggtgtgtgccaccacatgtggctaatttttgtattttttgtagagacggggtatctccatgttgtccaggctggtctcatactcctgacctcaaagcaatctgcctgcctcagcctcccaaagggctggattatgggtgtgagccaccatgcccggccatactttcgtaagttattcaaaactatagaaggagaggagctagctaatgcgcagaaagatgaaatgacgagacagagtgatgcggctacgatggcattgggccttcctaattcccgccgtgtaagcccctgcctttggcttgtgctgctctctgtctcctgtgtccttgtttgcatctgtcccttcccacaagtaacctctgcacttacttgatggcacagctttggtgcagccttagtgagccagctcatttcagttctgtggtttcgtttcataatgagtgattgtttctagtgtaatgtgttgcccttgcctctaccagaacagatcaaatacctcactaattatctcctccctgaccagaaaaacacaaactaagaaacctacacacctgtattcatgcacacgcacatatgcacatgcacacctggtgtcctttcctccctttctattgacattaatgacaccgctgttctccaagctgtccaggattcaaagctctgaagcctcgctgatgccttctcgtccttgtctctcctgccccatcatcctccatttccaccacagccactttaattatgccattattactctgacccagatagttcaggaccttcctaactggctatcctatattaatttttttctttctccagcccttttgttaaacttttaatttttgctgggaaacatagcctccggccaggagtcaggatcaggcacttccaatctccagctcttttcctgttatccggcagtctgaaaacatagtctggtcacggtgtgattgcattccgaagctttcctaagcccccactgcagggtgcagtcagcttgttcctgtcactcaggtacccagaacttgcctccatcttttttttccttatcttttaatttcagcgttcattgtgaacatgcgtcatgctcctggcaccccgcatctgctttcagtctgtctccctctgtggaaggccacctcctttcctatgctcttcagagagattcaccattcaaggattagcttaaaaccctgatttctggccaggcgcggtggctcactcctgtaatcccagcactttgggaggccgaggcgggcggatcacgaggtcaggagatcgagaccatcctggctaacacggtgaaaccccctctctactaaaaatacaaaaaaattagctgggtgtggtggcgggcacctgtagtcccagctacctgggaggctgaatcaggagaatgacgtgaacccgggaggtggagcttgcagtgagcctagatcacgccactgcattccagcctgggtgacagagtgagactccatcattaaaaacaaaaacaaaaacaaaaaaccctgatttctgactatgaataatctcttttgatgttcctgctctactcattgtctgtagcattcatttggcgcttactgtggaaagtatagtactgtgaggtgcctctttaatgtttcccaactgatccttgagatcaaagctcatctctgacgctattttctctttgtaattctaaagcttctagttcagtattttacacatctgaggaattgactcttcttttttggttaactttctgtttccgcacacaatgattttaactgccattagtatcaaactgttatttgcagcatttaatataaagagtgtatattagatgatgaatctctttttttttttttttgagacggagtcttgctctgtctcccaggctggagtgcagtgacgtgatcttggctcactgcaagctctgcctcccaggttcatgccattctcctgcctcggcctcccaagtagctgggactacaggcgcctgccaccacgcctgtctaattttttgtatttttagtagagacggggtttcaccgtgttagctgtgggcggcaagccacccaggcaccgaggcaagagaccgaggacacgagctgttccactataataaaatataaaacaagaatagttataccagatatagatcttagagatgattatatatgaatatcattaatcattagtttgtagcaattactctttattccaatattataataatcctcgctctgcaatcataacctaggaaaaaccaggccatacagagataggagctgaggggacacagtgagaagtgaccagcagacaagagtgcgaactttctgttatgcccagacagggccaccagaagggctctttggtctagcggtgacaccagcatctgggaagatgcccgttgccaggcggaccgtggtctagcggcagcgaaaagtgtcaaggaacaacactcgctacttagcagaccgggaaagggagtctcccttcccccggggaagtttagagaagactctgctcctccaccttttgtggagggcctgacatcagtcaggctcgcccacagttatccggaggcctaaccgtctccctgtgatgctgtgcttcagtggtcatgctcctagtctgccttcatgtttcatcctgtacacctggctctgccttctagatagcagtagtcaattagtgaaagtactaaaagtctctgatatgcaaaaataatggcgtaagctgtttttctctttgtctcctctctctctctgcctcggctgccaggcagggaagggccccctgtccagtggacacgtgacccacgtgaccttacctatcattggagatgactcacactctttaccctgccctttttgctttgtatccaataaataacagcacagccagacatccggggccactaccggtctccgtgcattggtggtagtggtcccctgggcccagctgtcttttcttttatctctttgtcttgtgtctttatttctacactctctcgtcgccgcacatggggagagacccactgaccctgtggggctggtccctacattagccaggatggtcttgatctcctgaccttgtgatctgcccgcctcagcctcctaaagtgctgggattacaggcgtgagccaccgcgccaggccgatgatgattctcttagtgtgaagtcttagcccacgcacctgtctccaagtcgtcttgccgtaggacttgcagatgtttgtgcactgttgggatgggtgataggatgaatatctgtggaaatagagggatcctttgggcagctgttttgagtagggatcagggaatagcagctgtgtccactgcccttcccttgtacagggagtgagagggagtgttcactgatcaagccaacttcatttccgcaagagatatccccacttccgggatgctattaaggcactgggtgttactccctttaaaacattcagagtgaactctcactagaggtattcacaacttaccagatgactttaaaaaaatacctctgttatttaattgacaaattattatattcagttggttataagttaaaatgaattggggcaaaataatcacagaaaccatctgattgctctagcaagtagtcattttatatgcattagatttcacagtaaatatgaaaagcagctctaaccacaagctggtcggggcggcatagcaccaggctgcaggtttgaagatcggtgcacagtcagggctatcgtctgcccccagtgggttggcagtggcacccataccacctggtgttccactgttatgggtttagtcttttgagtcttgaaggcttttgataacatcttcacattctaatagaaatattcagtggggcagaggtaggcaggcactattagtgtataggtgttgacacccaagtacctattttaggtaaggttagggacagggaagaggatgcaagggccatctggggacaggtgtcatggcagataagtgtcatattgcagagtaccttggggaaggggaaggaggacagattcataatacctaccttcagccttgctcagggactcccatgttggggagaaagagtttcttctctaaaatcctcagaactgggctcaagagccgagtttttattttttatgaaacaattgcccacttatactaaaaactattccccagcaggctttttggcatttgaagctttcagcaagcagaggattatataactgataaatattaagtattggaatttctgaggctggatcccttagcctggtggctgaaggccaaccctccctgagcctccttggcgtaataaagcataccttccaccttttccctgtaggaacttgctctgcctaaattgaagtcacactctttccttatctcaagctaaatttcctgcctttgagcactgattcattctttctcctgactctatagcccgttaatctttccaagtctagcttgcacttaatgtcttcctgaaaccatctgtgactgtaccacaaccatctgatcttcctttaagtaaatttatccaacgttcattgagccaattaagtactagccattgtgctagagattagagagaaaaataaacaaaaacagaccacttccctcttgtagcccacagcctagtcagggagacaaatgaggaaccagctgctacttattgaactaggaagagatgtgtccatccttaacatcatgcaggctgtctatttcaaaggccactgtcatgtttaagaggaggatgctagaggcatttctgtcaacgccaggaatgacaaggagccaggaacagacacacagatcactcacatggatctgaccaagtacctgagaggtggacatacagaggattccttaagcaatagtattgacttgcaaatcccaatacagaaaagccctagaaccttctatgcaaaagccccatcatccagggtaaaactgggcaaaggtcctattgagagacagacaggtcattaaaacggggaaacagatggaacttaaacctaagaaaagattttcaatgttattcaaaaataagagaaacacaaaggtgctctgaaatgttattttgttatctttcaaattgataaaaagcccaaagttaaagaacacacttttggtatggcagtgggtttcaaaatgggcactcctatccattgctggtggtagtaaaaatagatactactccagcagaggctagtgtggccatgtctattgaaataacaaagtgtccatatgacgtttaacttacaagtttttctctgaggaaggtatcctgcaagtgtactgaatacatgataaaaagtggatgtagagggttatttattgcagcagttttgtaaaagcaaaatatttggcacaacccaaatattcattggagagcaagttatgtaaattatgagatggaatgccatgcggttataaaagagaatcaagtagctcctcctgactggtataggaagatctccaaggcatagtgttttggaaaaaaggctgatgttgacagtgtgtatagagtacagtggaaaattagagttcatgtttgcacttgcttttatattgtattcgaaggtaatacaaacacttgtaacaaggaaaccccagaatgtcagggactgtacacagggaatgttctttctcatttggtaacagtgcttgtcacaggttgtcacaagcctgtaacatttgtaacaggttgttacagatcagcatgaggcttttctccatgcacttccatcttgtggcactggtgtcccttaggacttgggagtcccttgcagagagctgtcacatcgatttcttaacagccgtggcccagaggtgacataccccacttccctgaaaagatggaagaaactaataacagcaggtgccttgggggtggtgatggtggtacgtgactgggcaggaagatgaagggcaggaaagaggggaaaacttttaaaatatattttagcaattttgaactatattattcatttataaaataaaaacaaatcattgtaataaagccagatcatgctctgaaaatggtaagaacccagtgctgtgggggcatagaaggggcagctctgccttgcctcggggagcggacttccaagtgtgctgctttctgtggtgctcgcttgaagccctaaaggtgtagcaggtgttaaccaggtcaagcctgcaggaaaagaggtttgtgagaaaggggctagacaagtggatggcagagaattgccaggggattggtgaagagagggtggctgccgagatggaaggagtccatgtgcagatacagaggcaggatttacggtaaataggttaatacagcatatggagctgtgggtgctggaacctgctggaaccaccatcaccccaaaggcaactacggttactagtttctcccatcttttcagaaaagtggggtgtgtcccctctgggccaaggccattaagaaatcactgtgatgacttcgatgtcttttctcccaactctatgcaagggactgtaagtcgtaagggacacctggctggtgggtgggcaggtcaggtctgggcaggtcaggtctatgccagtgcatttgcatggtagaggtacaggacagagcgtggtgtgtgttgcagtaacatgaatgtcttatccaacatcctctgcaacacccatggaaagtttcaaagcaaggaagtgtcatgatcagctccagatctgatgtgagtagcatgaaggatgagttggaaaggaggatgacaggtggctgggagcttagtgagggtgctgttgctgtcatctaaggaaggaacactgacgttttagcatttctcctctaccaagtgaatttggcacttaatacaagacaagtaagtgttatcattttgtgtgtagctatcaggatctccaattagagtacaattgcattgaagaccccttcattttacattctagtatcatgccataaatacttcctggctgattctcttattttcaataaacttttattgatttaataaaacatacatatagaaaagtactgaaatcatgagttcatagccacatgaattatcacaaagcaaactcatgtgtatcgattggttggctcttattctgtttcttccttgttaaaattatggttagactcagcatgcttacaacctccccacccccactttgtccggagaggtggatagatgatttgtgttgtacactcagaccctgatttccataatgccagctttaatatttgttcttagagaagtctctgggaaatgtaagtcgtatggcttatttgaataatatttctattttatcttaaattattttaaatctctcttattttaactgtcagtttgtttactgtctgatgtgcagagaactgtgataaatgaaaaaattgagtgcaatctggagaggagtattagcatggtggcatagtcagaaatttttacttttctgtcattatataatggttttaaaaggctgaaagcaatccagccattggaagggtttgatagaattttctcgcccctacattcttacatttccctcccagtcccagttcgcgttgttcctttttgagtcaagagccaattgcttggaacattccatgaatttttctttggccacattcatttccatttgtgcttttgtctgttggactcttaatattcatggctcaaaatctctccgttatctaaatgaatgatcccattaattaatctaggaatattttattgatatgctggaagaatacgtatgtgttgaatttaaattgtgggcaggatggagaacttgggttttagaagaagatccaactgtttacaatattcccaaattatatttcatttataattttctcctcctgtaaagttttaagtcaagaagtaaaagttccagtttgaaatgtagagttaaataaaaataagcgtatttaaggcttatatgaaatagatgattatagttaactgaatactcactttgatttatgtttatttgctcctattggaacttggaagaaaaaaagcagagaattgttaattgggaatgtaggttagtaatccctagccagtagggacatgacatcttatgggagttttcaggttttatagctatatgcttttttctttatttatgaatttgcttttttatttgtcatctacactttcccttattttcatttgtgaagaatgttgtgtatcctggacgtgtcagagtacttgtttatgacctctgtattaccaagaacctttctaatgacttattttagtccacacttatgtgtgtgaataattttatcctccatacaaacttgtgtttatgaaaacatcctgtagacattgagaactatgcaagtgatcaggctggcttctagaaattttagattccaatttgtggcctatttacagccactgtgagggaacatctctgagctttattcctggctcaactgtatgtgtccaattttatttttctttcttctttcatggtgctatttttatttaggtggagggtggaggtgcaggtttattgaggtataatttaaataaagtaaaattcagcaattagatctacaattctgtgagttttgaccaacgcataaagtgtgcagctactaccaaaatcaagatacagagcagttagttacctctccaaattcctggtgacccttcgtagtcaacccacagcttatgctccagctcctggcaactatggacctgttttctgttcctgtgatttctccttttccagaatgtcttataagtggaatcacttagcatgtaaccttttgttccttttatttagcatgatgtgtttgagacgcactttgcacgtatgagtagttcattcccgtgtattgggaagcttccattgtatggatgcatcgcagttggtttatccatccaccaactgaacatttgggttgtttcgagtaaagctagctactttaagtatctgtttgcagatttctatgtgactataagagcatacatttttatttctcttggtaaatacttaggagtgggattattgggtcaaatgacaaatgtttgtttaaagaaactgctttcaaagaggctttacaaattgcattcctactagcagtctaagagttccaactgctccacatccttaccagcattgctattgtcttttcttttttgcttttgttattctagtaagtatataggattatcttattgtgattttaattggtattttcctaatgactaatgatgttaatttttcatgtgctcagttgacatttatatatcttctttggtgaaagtgtgttcaagtcttttgctcaaaaatattggtttgtgttctcattattgcattttgagagtctttcatatattttggatacaagtcctttagcagatatatattttgcaaatattttctccaaatatgtggcatgtctttgcattttcttaagcatgtagaacagaagttttaaagtataatgaaattgaatttgccagttttcactcttatagatcttgttggatcttggtgacctttgctttaacccaaggttgcaaagattttcttgaattttttcctacaattttatagtttgaagatttatatttaattctattatccattttgagttaatttttgtaggaatcacatatttttgcagagatgttcaatgttgcagcaccatttgttgaaaaggctttcttctcattgaatcatccttgcaccttggtgaaagatcaattgattatgtatatgtagatctgtttctggactgtattctttttcattgatctatgtgtttatccttttctccaacagcatactgcctggattactgtatctttataatatatcctttttgtttttttgtttttagagacagagtcttgctctgtcacccaggctggagtgcagtggcgtgatcttggctcactgcaacctctgcctcccaggttcaagtgattctcctgcctcagcctcccaagtagctgggattacaggcacctgccaccaagcctggctaatttttttttttgtatttttaataaagacagggtgtcaccatgttggctagactggcttcgaactcctgacctcaagtgatccacccgcctcggcctcccaaagtgctaggattacaggtgtgagccactgtgcccggcctataatatatcttgaaccagatagtgtaaatcctttttgttattttcaaaaagtttattattctagttcttttgatttttaatataaattttagaatccatttattgattttttacaaaaatttctgctggatttttgactgggatcatgttaagtgtatagattgatttgggaagaatggccatcttaccaatatcaagtcttccgatccattccatgaacatggttttattcttaattatttggatcacctctgtttttgttcattagtattttgtagtttttagcatacaaatcatgcacatatctggttagatttattcgtaagtgttgggtttttttaatgttattattaattgtcctgttgcttaagtttaaatttcccattgttcagtactaataaataaaaatatcaatatggaatgtgtaccatatatatgaatacatctatttaattaatttagttctcaagcaaattataatatagggcacttttgattccattatctcttggcaaaatggttgattgtgtatttcatgataatattttaaatagtttgtttttcatgttttattttaatgctttggttggtcaaacttttgaaactttataagaaaatgcattaaaataatttgataatttgattattagggctttttattattccatacaacatagttatggtgagtgttcactatctgctctttggataatttaatttttatttctagaccttcatgttactgtctaggtgtttgtccctagcttttaaggtctttcaataaccagcttgcttttgtccatttcattttcttcttctctttgatttcatgattattagttatgtttgtatttttcaccattcaattcatgactttctaatttgatttattttatttagagatatagaatcttagagttgaaaaaattctggagattaatccaaggggtttttcttttaaacttgaaaaaatgtactaatattagggaaacctaacacctgttttgttaatttgttcacatggaaaagttaagatgcaaggtctaacatgtaatgctggtttagagatcctggtttagagacaattctagtatggtcagtggggctgtctcatgatatgtgttgtgatgctggatgataagatgtaaggtagttgtttcgtggtgcttgcaggggttggagggaatttccaattatatgggagctagtgtgcttgcttagggtgttttactcaaaaggctatagagaaatataatatgtgaaaatgataatcttcaaattgttatgataaaatattttagaaaactcttggaacatgtaactgatttgctgcattaaagcacctttatgtttcctcccagaattatgtttaattataagggagcttattaacattgttctagttaaattatattagcatttctattatattgtgtttgttcaaggatttaaagtgctgtaagttttcttctagtgcaaatgtctatatatagtttttaaatgggttggaaattactaattataaaaggaataaatatttgaaaagctaatttgacagcaaccatttctattattagtcacataaaatttctaatagttaaaagccaaatttcagttatttttctctagcctttttgccaataattatatataatcttagtcataaatgagttttgtgattttgccgcttttcttataactttgtattttgatatgcattttaaaattatattttgaaataacttcaaactcagaaaagtcgtaagaatggtatgaggaattttgtataccctttaaaccaagcttgtccaacttgcggcccgcgggctgcatgcagaccacgatggctttgaatgtggccccacataaattcataaacttccttaaaacattgagatgtatttgtgatttgttttttgttaacgtgtggcccaagacaattcttcttccaatgtgtcttagagaagctgaaagactagacacccctgctttaaacagtttcattgtttgcatacattttgcctcatttgtttcattattcattctttttatgatttttggggggtgtaatttagagacatcactcctcttgaccattatatgtttcagcccctatttcttaagaacaaggttattcttttagagaaccacagtacaatgttcaaaatcaggacattgaacacagatataatactataatactactgtctaatccaaagtccatattcatatttcaacaattgttccccaaaatgttcttttttgctataatttttcctggttcaggattgagtgtgggatcatgcctgcatttccttctcatacctttagtctcctttaatctggactatccctcagctttcttttactttcttgaccttaacatttgtaaagacacttttgtcaggagaccataggtcagatgtcgtgttgttctcaaggcatcataatgttacgttgtcccaagtctgatgattgttaattttgaccatttgcttaaagtgggtgtttgctagcatcctccactgttagttatgagttttccctttgtaagtaagtaactcgtggaagttacttttgcactacgtaaatattctgctcctactcaaacttatccactagttttggcacccatcagttttctgactccatcattcattccatagtttttgactggcatttgactattaagaaagcgcttttccttctccctatttatttgctatttatatcagtatgcactcatagatccttaatttatctaatgggttatgatctatgactcttcttatttattttgatgttcaaattttcccagttttggctactaggagtgctttcaagctggttcctgttcatatagctccatcatcctacaagtgcttgcttactttctagcagatgtttaaagctcatgttgttatttattcactgtccttgccctagaatcaatcagccttttctctaaggagctctagttgcttttaatggagaatagtgtttagcagcctaaatttggacactagaagtgctcattgctgccggtgtgtcattgcttctagacctttataaacagagcaaggaaatgtttgtgtgtatgtgtacgtgttcacatatctacctaccagaaacaatgaattcaaatagatactcccattccaattcagtgctacaatgtacattctgttctctttccatattttaactctcttatccaaaaagcctcttattatcctcaatatatttactcatttgtgtaagcctagagtacactgtaaatagtttccgaactgctaactcatactgctgtgaaagcaaacctactagctagagttaatatttgtttccagttcttttttaaggtaaatttacttacagtactgtacacaatttaattctgataaatgtattgacccacataacccctacctctatcaaaagacagaatatttccattcttagaaagttccttcatgcctcttcccagtcaatttcatgttcatagacgcaagcatttttctgattttttttttaaaaaccatagatcagttttgcctgttctagaatgtatatatatagaattacgcagcatatacttctttgtatctggcaacttttgaccaacgtaatgtctgacatttactgatggtgatggtaaagtttcgtagtcaacctggctacgttaaatgtgatacccagatagctggtaaaacattattgctgggtgtgtctgtgaggatgtttctggaagagactagcatttgaatcagtgtaaaaagatccaccatcagggatatgggtggctattgcccaatccattgagggcctgcaggaatagaacaaaaaggtggagaaagagctcatcctttctctctttttgagcttgggcatctatcttctcctgcccttggacattggagctccagtttctcaggccttgagactccaggattgatactagcgccttttcctggttctcagacctttggccttggcttgggagttacaccattggttctcctggttgtcaggtctttaagcttgtactgagttacaccatctgtttctccagcttgcagacagcatagcatgggacttctcggcctccataatcatgtgagccaattcctgtaagtctcctcttacttgcttatatgtttctctggagaaccctgactaatacaggtacaatgctggatgtatcagtagtttgttttgttttattgctgaatagtattccactgtgtgaaaatatcacaatctacttatcttcctgttgatagtctttgaatcatttcagataagttatgaataaagctgccatgaagattccctatacaagtctttttggagatataagttttcattggataagtatctaatagaggaatcactgcattgtgtaagtgtgggtgtaactttataaaaactttcaagctattttcctaagggactgtatattctttaccatgctccaaatctatataatgcagcattctccagtgatagaaaagtaataggatatgtgtatatagacagaaagagacttattgtaaggaactggcttatgtgattatggagacgggcaagtccaaatctgcagtgtgagctggcaggctcgagatccaggatagctgatggtgcagatgaagtctggaggcagtctgctgggaaattctcccttccctggggcatctgatctttttgttctgttcaggctttcagctgattggatgcagcccacctacgttatggggagcaatctgcttactcgcagtttactgatctaaattttaatctcattccaggacactctccaagatgaaattaaccatcacacatccaccccttgtcatcctggtgctcatacacatctccttacaccacgattaatctccactaaaggcgataacaaggtcatacttccacctaacatgatacaactagtctgcgtacaatggaagatgcattgactcttttcccagaaaaggatgcaaagtccttggatgatgtttgctcttttcttcgatgtcttgcaacttaaataccatcatgtaaagttaacaatatttaaatgctacactaggaagtcagtatgtcttctgttacatgataaagggacaagaagtggagaagaaagcaaagatatttgcttaacatacacacacacaataagggggaaacactcatgacagttgcagtcctcattcctgtaactggtcacatggttgtagctggtattccttactcccatggattacgtgttccctttaccatcagcaagcacctcagtcggtcatagttctgtacctggtgggatgacttgaatcattactcctaaaaggtctgggccattcatagccctgcctgaattgggttatagttttcccttgactttaatcacaggccatagtaatagtggggggataccctaggaaatctcctgtattccagacatgcttttccttatctctctagtgtggatccccttggcagtcaggatcagttactccagtcaacacaagatctcccttctctgcctgctgattcagaggcatgggggacccaaggtattgtccgtcctcctcagcaactcattggagttctggctgccttgtatccctgctggcagttggggttgtcaatatttaacttagccattctagtagttgagaagggatatcttagagtggcttaatttacatttacatgatgaccaatgatgctgagtccctttcatgggcttactggctgtttctatccctttcttgtgaggtgttcctgtgttgtgatgtgttcaaatcttccttgagttcttttattgagttgttcttcttttaacatggatttgtaagaattgtctttgtttgtttctttgaatccaaatttacaaggcattttttctaacttaggttttataatattttaccccagtccatggctggtctattttttaacactgtcttttgaagaacagaagttctacattttgataaagtataatttatcatttctttctttaccctgcctaagaaatcttttgcataaagattttctgtgaagatattctatatatattctagaagcattataattttagccttcacatttagttctatgataatccttaatttaattctttataaggtgtgaggtaacaattcctttcatctttttccccatatggatatcagctttcccagcatcatttgttgaaaagacttaaattgactatataaatgtgggcatattctgggaccttatatttctgttccagtgatttaatctaatgccactacattatatagccatattaatcaatctaatgtattgattaagattagtatggctatgtaatgagtcttgaaattggatagcgttaaggctttgaactttgttcttctttcttaagatgttttgggtattctaggttttttgcatttccatatatattttcgaatcagcttgtcagtttctttaaaaaggcctgttggagttatgattgtaattgcactgaatctacaaattattctgggaagaattaacatctaagcaatactaaatcttccagtccatgaactgagtatgtatttccatttatttagatcttctttaatttctctcagtaacattttatagtttttagcatactgttcttgtatgtcatttatttgtttattcctatgtattgatagttctttgttattacaaattgacttgtttttaaaattccattttaaaattgtgtgctatgagtttatagaaatttcattggtttttatctaatgaccttatgtcctgtggccttgctaaatttacttacatattctagtagttacttatagataggatttgccaggtaggtaaccagattgaatagaatcagttttagttcttccttttcaatttgaataactgttatttcattttcttactttattgcattggctaggacctccaatacaatgttgaagaggagtgagattacatattgcagcattttcttatctgacatgcattgtattttgtttgtctcacagctcagaaaggccttactgaccattctgtctgaaatacatcttcctctttttatcattatctcagcatcatacttaattactttatattccttgtcataaattatatgtatttctttgttgtctgtctcttacactaatccgtaagcgctttattggaaaaacactgttttcacaatcacatcctcagtgaataacacagtggctcttagtagatactcagtaaatgttttgtagaattagtcaatattgggaggaagttttagcagttatgcagtctattctccttactgtcttaatctccttggcaaaactgaggacaagtattttttcttgcaagaaaattttcatatttctcttttcacctttctaatttttaggagatttaatttcaaattttctcatagaaaccacttatatttaatactttcaaaagttcttaacttacattttataaaaagcaatacaattctttctactaatttttgaaaaattatcgtgatggcgggtgttacatacactaaaaagttaatcaatattcagcattttgcagtggttcaaatatagcaacaaagtaaacacatttcacaaatatctactaagcaggtgttaggtcaccattttttactctttaagatctggagaaattgcagcgatgaagtgaacttgttaggcaaaatatttccttatttttgcctctcatattttgccctaatctaggccatgcttcatttgctttttatataatttaaggctgatgaaggtaagttgcgttcagcctaggacacagtgatctaggatttagccaaaaggcaaatatctttcttcctgctgctcaattttagcagctccatttaaacagctggtagaaagtaaagcttcagtttatgtgcacataggaggaaaataatattttgtgttttctattgtgtgttgaactaagtccttggcttattctactgaccgacaatggagatttccttaaataaataggtaaacacattctaagttgggtgttcattcattcaactccctctttccctcatccctcctctttctgtcctcttccttcctcctttcccccgacttccctccctctccttgtacctttgctctttcttctacctttcttcctttgttctctctcctgagctctgtctttgttacagtcaatgctcttgtgcaaatgtagtagagaataaaacacctgtaccctatgcattgcagcttacattgtagtgggagaggtagacagtaaagaagcaaatataaacatgcgacaatttttgctcatcgtaagtgctacaaagtgttttgtggtgtgtgtgtgtgaatggatgcgagatagagacagcaggacagtgagaatgaatgagaatcatgaaaggcctcctcaaggaaagggatatgtgaagtgagctagtgagctgttcatttagaagatccaggaaaagtgtgtgaggcagtgggaatagccggtaagaaaccctgagaagggaatgagcttggtgtcagagaaactacagtacagaagcttggcctaagtgaagtgagcttggggggagcactgtgagatgaggccagagaaggaaatggtgactccagaggacgtgggtaggctatggtgaagagtttcagtttgattccaagtgtagtcaaaagacagtggtccatgtgtggtattatttcattttgtcatttagacattttgaaaacatctctaatttgatcaaaatacttaagttcaaattctcatgttagttttgtcttccagaaatagaaaaagaaatacatgtggcaaaaactgacaacattgaaaaaagatgaacaaatctacaattacaaatggagagttcaacacttcactgttgatgatggatagaataaatagacagatggccgcgcggtggctcacgcctgtaatcccagcactttgggagggcaaggcgggtggatcacctgaggtcaggagatcgagaccagtctggccaacatggtgaaaccccgtatctactaaaaatgcaaaaattagccggccatgatcgcgggtgcctgtaatcctagctactcgggaggctgaggcaggagaattgcttgaacctgggaggcagaggttgcagtgagccaagatcgcgccattgcactccagcctgggcgacagagcaagactccatctcaaaaataaataaataaataaacagacagacattctgtaaagattcagaggatgatcttttatttctatggatttagggggtacaagtgcaattttgttacctagatacattgcatagtggtgaactctgggcttttagtgtacattgtactcaatctgtgatttttcatggcttactcctctcccatcctcctgccttttggagtttccagtgtctattattttactccctatgtccatgtgtacccattgtttagctcccacttgtaaatgagaatgtgcagtatttgagtctctgtttctgactgacttcacttaggataatggccttcagttccatctgtgttgctgcagaggaccatcttgaagaactctatcaagcccacttggtttaattgcctttgtattcttttaaatgaaacactccaccctataagaacagaatgcaccctttcttcaagtgccatacagcattccgttagatagaccaaaagtttcaatgcatttaaaagcattgaaatcataccaagcatgttctctgaccacaacagagctaaacagaaaatcagtgtctgaaaaatccccaaatattttgaaattaaactacacccttctgaaggactcacggatcaaagaagaaatgacaagggaaattagaaagtcctttgaaatgaataaaaatgaagagacaacgattactcttaaaatcagaatactaacatacgaacagatagagatgtgtatccttcccatttgcctgcttcttgaatttcctacttcctgcctatgttggggtcgttgcagtttctccatgggaggagcgtggctgtgctcctgctgcaggtgtgcgcctgaccctggtaaagtctggctatgcctatttaactagtactcttagtcattctactctagtttgagtgaacgaacacttaccattttcaaaggccacgttccgggaactatgaggggaatttatggatcagttacagaccagttcaagttacaagatccttatgctaatgttaattaaaatctcatcacagccacttcctttttcagtcccacctggggaattctggtccacttcatctctacatggtagactttgtgagtctttcttcagttcctttctgcagcttctgtttctgcgaactctccgtttaattgttttgactttttggaattttataatcttcaagtatctctaccttcagtctggtatcagcttgttctatttaattttgtttatctaggcgtcaccattaggcattaagctaggcactaggttttcaaatggaatgggagccttataaatcaggtaattaattagtgtgtggtaaatattttgacagaatgttggaaaggctaagtaaacattcattcagtgaacatttattggccacctactgtgtaccaggcattgtgcaatagggtctgtctcatcagagaagacttcagagcacagttggcttttgagtccaattctggttatttcaggagttttcaaggtacagagaggggcgtggtattctaggcaaaggtgtttaaaggtgaggcttgtagttgtgaaggagtaaagcatgacctgggaatgggtaatctgctctggcactaggtattcggtagggacttggaaatagtgagtgagtggcaagagaaaggactagaaaggtttgggaagaaaggactagaagggttctggtgtttttttttttgtttgtttgttttttttttagggagtttggtcctattttagtgggcatagtgtttattagtgtcttggtgattctcaccaacacatactgtctgtatctcttattcctttggttgttattttggtcactacaatggtcagcggctccaagtggtggtggtgaatgccagccctgtcgtatcatacttttgtggaaagtggggggcgggggtgaacatgaatagagaaggaatcctgaagcaaggagccaagtatgtggtatttttctgcctggagtatttccttctaggaattaattaattcactagcttcttgaaatcttttttttaaaaaaaaaagtagaggaggaagaggttgaggtataaacacattgctttgaaaacacccttgtgggataaaatttcaattaattgcccaccctgaaattttttatttttttcctttaggtttcttgctatttaaagatttttgtttgaatgaaattaatgaagctgtacctcaggtgaagttttatgaagaggtaagaagtaactgttttactgatgcttttctttcaaaagcatatttaaactgtactttggaacatattaagactacttaatatcttacaaatatttagaaattcattgaaagtaattagtagtgcaaaatatagtatcaagtttgagatgctaacaggtatgaaaagctgagtatgccataaaagtcgcattcttaaaggcttcagagtgctatggaagcaatgagggacagttggactaaagttccagagatgggaggctcatccagagctgcaccaaggaggaccagttattttattttctgtggaagcgtgctagttctggagatgtgagcagaggcagaggactgctactagctttgaaagagatactagccaaggttttctggtcataatggactgacaaattggagatttggtggggggtgtggtggggtgctcaaatgcatgactgattttccccataagaaatttggtgaaatctgaggttggaggggagctgaagagagaggccagaaacttccagaaggcacattgaaatctcctacagccttacagtgcctaggaaacacagacctgctggagtctggagtctgaaaacagaatgggcgagagatggaaactctagaagatgtggtctggtgacattgggtatctacagctacttttcacctagggtttctgttgatttcaggtgtagcaggcagatgggcatccaggcttggctgcttctgggagacaaaaattgcagaaaaggtttctggagctagagtttaaaaataacactagaggagccccacatatgtgattagtcaccctttcaaaacacacgccaagttttcaaactgagtggggtgggaggccaaagagctaagctgaaaacttgtaatgggcagaactgactccagtgctaaggaaataaaagtgtctccttgaactccatagacggcgtgccttagaaacaggatcaaagcaggccaggcacggtggctcacgcctgtaatcccagcactttgggaggccgaggcgggtggatcacgaggtcaggagatcgagaccatcctggctaacatggtgaaaccccgtctctactaaaatacaaaaaattagccaggcgtagtggtgggcgcctgtagtcccagctactcgggaggctgaggcaggagaatggtgtgaacccgggaggtggaacttgcagtgagccgaggtggcaccactgcactccagcctgggcgacagagcgagactccatctcaaaaaaaaaaaaaagaaacagggttaaggcaaaagcagacagggtcctaaaaaatgacaacccaacctagcgccatccctcattggatgatgagctccctccttacctgcttaccagagtacaaagggagcccttttttgtcttttttataggtaggtaataacattatataaggactctatagtgtttagcatgcagtaaagaattatgagacatgctaagaagcaagatcatgtgaatcataaataaggcaataaaagcaggccagcaggtgagtcagatattggagttagcagacaataactttaaaataactatgaatcatatgttcaagaaaaaagagaaaaagatggacaaaatagatgaagggatacataatttcaggataatttgaatttattatgaagacttaaccactttagaacagaaagtactatatttgaaattagaactaatggttcagttcaatagcagattggttagagttccagacacatgtaggtttggagtttcagaaagagaagggagagaatagggcaaaagcaatatttgaaaagataatactaagaattttacaaaatgatgaaagacagcagctaacagagttgaaagcttaggaaaccctaagcagaatgaatacatatgaaacacacctttgggtgtcaatataagactatggaaactatgacaaagtttttaaactaggaaaaaaatatttaaaatagccatggtgagcagtgggaagacacaatacttttaaagagcagcaatttgactgactgacatcttaagaaaaatgatttttaaaaaaagacagtgaggctgggcacaatggctcacgcctgtaatcccagcactttgagaggccaaggcgggtggatcacgaggtcaggagttcaagaccagcctgaccaacatggtgaaaccctgtctctactaaaaatacaaaaattagccaggtgtggtggtgcatgcctgtaatttcagctactcaagaggctgaggcaggagaatcacttgaacccgggaggcagaagttgcagtgagctgatatcttgccattgcactctagcctgggtgaccgagggagactttgtctcaaaaaaaaaaaaaaaaaaaaaaagaaaaagaaaaaaaatgaaatggccatcattaaaggagagaaagataattgccagcctagaattctattcccagcaaaaatttccttcaaaaatggaggacgaggaggtggaggaaggagagggccccgggcctcacctccacccaccgccccctcccaccacccggagctgcagcagcagcgactcatgagagcacagccagaggacagatttgataatgggctgcattaaaagcaaagaaaacaaaagtccagccattaaatacctgaaaatactccagagcctgtcagtacaagggtgagccatgggagcagaacccactgcagtgtcaccatgtccatcatcttcagcaaagggaacagcagttaatttcagccgtctttccattccattataccatttggaggatcctcaggggtaacaccttttggaggtgggcatcttcctcattctcagtggtgccaagttcatatcctgctggcttaacacgtggtgttactatatttgtggccttatatgattatgaagctagaactacagaagacctttcatttaagaagggtgaaaaatttcaaataattaacaatacagaaggagactggtgggaagcaagatcaatcactacaggaaagaatggttatatcctgagcagttatgtagcgcctgcagattccattcaggcagaagaatggtattttggcaaaatggggagaaaagatgctgaaagattacttctgaatcctggaaattaatgaggtattttcttaggaagagagagtgaaatggctgggtgcagtggctcatgcctgtaatcccagcactttgggaggccgagttgggcggatcacctgaggtcaggagttcgagactagcctggccaacatggtgaaaccccatctctactaaaaaaaaaagtacaaaattagctggacgtggtggtgagtgcctgtaatcccagctactcaggaggctgaggcagcagaatcacttgaacctgggaggcggaggttgcagtgagctgagatcgcgccactgcactccagcctcggcgacaagagcaaaaactccgtctaaaaaacaaataagcaaacagaacaaaacaaaacaaaaacgagagagcgaaactactaaaggtgcttattccctctctattcgtgattgggatgaggtaaggggtgacaatgtgaaacaccacaaaattaggaaacttgacaatggtagatactatatcacaaccagagaacaacttgatactctgcagaaattggcaaaacactacacagaacatgctgatggtttatgccacaagttaacaactgtgtgtccaactgtgaaacctcagattcaaggtctagcaaaagatgcttgggaaatcccttgataatctttgcgactagaggttaaactaggacaaggatgttttggcaaagtgtggatgggaatatggaatggaaccacaaaagtagcaatcaaaacactaaaaccaggtacaatgatgccagaagcttttcttcaagaagctcaggtaatgaaaaaaataagacatggtaaacttgttccactatatgctgttgtttctgaagagccaatttacattgtcactgaattgatgtcaaaaggaagcttattcaatttccttaaggaaggagatggaaagtatttgaagcttccacaaatggttgatatgcctgctcagattgctgatggtatggcatatattaaaagaatgaactatattcaccgagatctctgggctgctaatattcttgtaggagaaaatcttctgtgcaaaatagcagattttggtttagcaaggttaattgaagacaatgaatacacatcaagacaaggtgcagaatttccaatcaaatggacagctcctgaagttgcactgtatggtgggtttacaataaagtctggtgtctgctcatttggaattctacagacagaactggtaacaaagggcagagtgccatatccaggtatggtgaaccatgaaatactggaacaggtggagcgaggatacaggatgccttgccctcagggctgtccagaatccctccatgaattgatgaatctgtgttggaagaaggaccctgatgaaagaccaacatttgaatatgttcagtccttcttgggagactacttcactgctacagagccatagtaccagccaggagaaaacttctaattcaagtagcctattttatatgctcacatctgccaaaatgtgaagaacctgtatagaatttctacagggatcaaaagaagaaaatcttctttactctgcacatttttaatggtaaactggagtcccagatatggttccacaaaaccacttttttttaccccaagtattaaactttaaagtacgatgatgaattttccaaccgatttcagggtccaaagaaaatagagctaagatactgatgacagtgtgagtgatagcatggtaatgaaggacagtgaggctactgcttataaatcattttctttcttttcttccccaaagtcagaattgctcaaagaaaattatttattgttatagataaaacttgagtgataaaaagctataccataataaaatctaaaattaaagaatatcatgggaccaaataattccattccagttttttaaactttcttatatttattattctcaaaagttttttctgagttaaatagtcaataggcaatcttaatatatgcctccttttgcatggacatgggccaggtttttcaaaaggaatataaacaggatctcaaacttgattaaatgttagaccacagacgtggaatttgaaagtataatgcagtacgttaacattcatattaatggaactgaaaagtagaataagaaatttttcacttcagtccttttctgaagagtttgacttagaataatgaaggtaactggaaagtgacttaatcttgtatgaggttgcattgatttttttttttttttgagacagagtcttaccctgttgcccaggctagagtgcattggcgccatcctggttcactgcaacctctgcctcactggttcaagtgattctcctgcctcagcctcctgagtagctgggattacaggtagcaccctgtaatcccagtgccaccctgtaatcccagtgccctgagtagcacccgccaccacacctggctaattttttatatctttagtagagacggggtttcaccatgttgtccagtctggtttcgaactcctgacctcgtgatccgcctgccttggcctcccaaaggcatgagccatcatgcccggcaattttttaaggcaatatataattgaaactgtactatccaatccaaggggaaatcttttaatctttagataacatgcggagtaagacccagcatttaaagagcacttttaaaaaaatagacttggtactgtgagatattgctaatatgtccttatggtgatgggtgccacaaatagaaaatagaaccagatcagggacttgaatgcacttttgctcatgtcgaaatagatgaacagagagagtaaaatgtatttcaaagaaatacgagaaaagaaaatgtgaaagttttacaagaagagggatggaatgtaatgtttaatgttgatgtcatagagtgacaaaatggcattgttggcattcatagctcctcacttagctatcttctgagacttttaagagttataaggtataactaactataaaactaatttttcttacacactaaatgggcattatttgttcaaaatagtgaagtttcggcttcacattcattccagtgggatacggcttttatgcaaaacatttttagaactccagttttcaaatcatgtttgaatctatattcacttttaaagtctacttaatggtggtcattttttcccctttagaatatattaaatagttgatttggggaggaaaacttattctgaatattaacagtggtgaaaaggaatgtggaagttaacctttaccaaaagaggaagttggcaaaaacagccttctagcacactgtttaaaatgaataatggcagcctaaacttaacagtttttaccctgaagtgcaaaagtgaaacatacaaaataaaactatttttaagagtaactaaaaaatttcaaaatacaaatttgaatagcagcattagtggtataagtgtctagcaaaggaaaaattaaatctaataaataaaatgaaggtctagtgtgtatgttataaaatactctcttacagtcacaccttaaattaaaccttatactaggttcctctattttcaggatataattcttaactatcattatttacctgatttaatcattagatttgaaattctgtgccatggcatatacgttcaaattcaaaccattttaaaatgtgacagatggacttcatgcaagttggcaatggttctcgtactaaaaactgtggttgttttttctgtttacataacctgcttagtattgactctctaccaagagggtcttcctaagaagagtgacgtcattatttcctcttgtcaacaacttgtgacatgagattcttaaagggctttatgtgaactatgatattgtaatttttctaagtatattcaaaagggtaacaaaattatgttatgtactaaatctgatcaggaaagtaagccaggaaaagttgatggtattcattaggttttaactgaatggagcagttccttatataataacaattgtatagtagggataaaacactaacttaatgtgtattcattttaaattgttctgtatttttaaattgccaagaaaaataaacaactttgtacatttgaagagtttttccaacagcttttcgtcttcagtgtcttaatgtggaagttaacctttaccaaaaaaggaagttagcaaaaacagccttctagcacactttttaaaatgaataatggcagcctaaacttaatatttttataaagtattataatattgttttgtggataattgaaataaaaaattctcattaaaaaatgaagtgatataaggatatagttagacaaacaaaaactgagggatttgtcaatagtggacctgcatgacaagaaatactaaagggaggtactttagtcagaaggaaaatgatctggccaggcatggtggctcacgcctgtaatctcagcactttgggaggccaaggcaggcggatcacgaggtcaggagaccgagaccatcctggctaacacagtgaaactctgtctctactaaaaatacaaaacagccgggtgtggtggcaggtgcctgtagtcccagctactcaggaggctgaggcaggagaatggcgtgaacccgggaggcggagcttgcaggaaaatgatccagatggagatgcagggagaaatggagagcatgaagggtgaatatgtatgtaaaatataaatgaatgttgactgtataaaacaataatgtcgtgtttctcgagcttaaaataatctagaactaaattgcatgacagtagcacaaaatgcaggggaggttaatgaagttaaaatattttaagtttctaggattattgggggttagtgtaagtaataattttagtataagtaataatttccattggattgtaatcagtcagggatgtttattttaatttctaagataatttataaaagaatagtgtatatagtcatgcactgcataatgatattaggccaacaaaagaccacgtatatgacagtgatcccagaagattttaatactatatttttactgtaccttttcagtaaaaggtacgtatattcaaaaggtaagtatattcaaatggtaagtttgaatatacttaccattgtgttacagttgcctgcagtattcagtatagtcacatgctgcacaggtttgaatcctaggagcaataggctacatcatacggcgtaggggtgtagtaggtatacgatgtaggctcttgtaagcatgctctgtgatgttcacacaattatgaaattgcctattgacacatttcttagaacatatccctgtcattaagctccacatgactgtatatctaacaagttaaaagagggaaaaattaaaacaacatttgctaatcaacagaaaggcaaaaaaaggaatataagtaggacataaaataggtgggtcaaattgcaaacaaagagtaagtagctacaaatctatttaagtaattacatttcatgtaaaggattaaatactccaagtaaaagattaggtttttcagactggataaagaaccaaccctcccccaatatactgcttacaagagatataaacacatggatggaagaggtgatataatacgaacactaaccaaagcaaagccggcataactacactagtatcaggcaaactatgcaataatgctgcttttaaataaagatatgtttcttaatgataacagggccaatccaacaaaaagatatcacaaactgaaatctgtaggttacaaataacttcaaagaatataaagcaaaaattggcagatataaaatgacaaatctataatcctgttgggagatattaacacataaccttctagagcttatagaacagacagacaaaaaattagtaaggatatagaagatcctaataaaatgatgagtaaatttgacctaattgacatatgtaaaatgctgcacctagcaaaaatagaattcacattctttttttttgagatggaatcttgctctgttgcccaggcaatgcagtgacatgatctcggctcactgcaacctgtctcccgggttcaaccaattctcctgcctcagcctcccaagtagctgggactacaggcacccgccaccacgctcagctaatttttgtatttttagtagagacggggtttcaccatgttggccagcctggtctcgaactcctgacctcgtaatcggcccgcctcagcctcccaaagtgctgggattacaggcgtgagccaccggcgcccagcccacattctttaacgtacacatggagcatcaaaatagatcatgtgctgagtcctaaaggaagcttctacaaatttcatgattgaaattgcttagagcatgttctctgacaatagaattaagctcaaatttaataacagagttaaactaaagaatccttaactgcctgaaaatgaatatacttctaaacaatttataagtcaaagaggaaagtaaaatagaaattagaaactatttttaatgaaaatatatttaagaaatgatatataccattattattagtgtgatatatctttatcctaaaacattaaatggtcaaaagaaagcatagcatgactggacctgcctgatattagtcatcattgtaaaaatttgaaaattggaggaatattcttttctttctcatttatatatgaaaatatacataaaaatatacatacacatgaaaacttagaaaattatgttaatgtatttttaggaagaagggtcaaattatgatgtacgtttaccataatgtaaaaacgtaagctaaatccaaaaggattttactcagtgaccttattatttcagtctgaatcataatcaggcattttacctggatacgtatcccagcttgatctgtcataaaaaatttctttcttgtgtttctaaaaacttcaactctccagtttcagcatttactaagtcaccttgtcaaacacagagaaatctcctttagcagataatttttgctgggttgaaacagatgggcaatctacttgtggttatttcctaagtacttattgcagatatggtggtgattgctgctcatgcatttccatttgaacttgaagcattggtgtttctcttagctggcatcctccccagctcttctcacctctcttctggcttggcacatggtgggtctggctcatcagatgatccccttggaggatgctgcaaaactcctcagcaacctgctctgtattctttggctgaagatatcctccactcttggggctcaagtgcatttctctaagtcaatgcagcctttacactttgaagttattagtaattcttctctgacccctcatttttgtcagtttagtaatttttctttaatttctgcttgttgatttgtgaccccaatctctagaaaactcttgtcaggtatcttgaaatgtacattttgtacattgtatttccactttcctgtgtccccaaacagttacccatttcccatgttaaagttctaactgcgtatcctggcattcaaagtatctttacattacttattacctacctctccctgttagttttcactaccttcttacatagaatgtctacgttggccaaacctgactaaccagcattccccaaatccaagcccattctttttgttactttactgtgtcctttccccagcctagaatgctgctgcttcgcttgttgaaagcctagctttctctaaggtctagctcaatatggaaaatttctacattttctagcaagtctgtttgtgcagctatttccgtcttctgtgatggctgactcctctgattcttacactgtttgttgtctaatgctcatgtcatgcctaccatgtgcctgctgcttgtgtgtgtgtggtcagcattttcatctggaccattatttgactcatcagcagaagacctagctaggatctaggtgcaacggtgcctcttacttgctgtgggatatggggcaagtcattcagcaaaccctgaagtatctaccttatgtcagaccctgagcttacaaatgcagacactgtccctgtacttgaggctgtcatagtatgagggcttcatatctgaacttcagttacctcatctataaagtgaggctagtgatcgtcttctgcttacttcacaggctaactgtgagtttcaaataggacaccagatgaacaattgctttctaaaccatagtgtctataatatgctgttccgttacgtgcagcatagtggttgaaagttctagtgctgaactctgactgcctggatttcaactctactgcttactagttgtgtaaacttgggaaagcttttctctacctgggtttccttagctaagaactggaatgattatagtacctgtcttgtagggtggttgtgtgtatacacaacacacatagaacagtgatgccccacagctactgctctgtgtgttgatttatatacttcttattccagttagattttgaggcagcttatagaaatatgtacattatgcctagatttaaaaataaataatgggaaagagaaaataaatattattccaaggtaaagttactatatagattttttcactgattcaaccaatatttatttattattttttaaattttgagacagggtctcactctgtcacccaggctggggtgcagtggtgcaatcatggctccctctagtcttgaactcctgggctcaagtgatcctcctgcctcagcctcctgagtagcttagataacagggtgtaccaccacacccagatactttttttttaattttaaaaatttttgtagagatgaggtctcactgtgttgcccaggctggtcttgaatttctggccttaagtgatcctccccccatagcctcccaaagtgctgggattataggcatgagctactactactcctggcataaccaatatttattaaacaccaacattatgccagacactgttcagatgaacagatacaaagaacttatctctttgagcttgtattctggttgagagaaacagacaagaaacaaataataaacaggaaatgtacctggaagtaaaaactgctatgtaatgactcaaaacctactcaaaactcagcatgttgtattgtgacttggtgaccactttagattgatgggtcaaagactgtctgaggagatgacatctaaacccaggtttgaatgttaaagaggctggtcttttgaagatggaagcttggtgagggggagagcattttaggctaaagttgtggccaagacagagcccctaacatggtaggaaagaactgggcatgtttggggaactgaaacaggactagtgtggtctggttgtactgcatgaagagaggggcaggtagtgtgagataagatcaggttgaagagagaggcagagtgtttggggccagagtaacacatttacattttattctaatgcccgtggaaaaattaaaacagaggagtattaggtgtcatgttttataagtatcagttaggtcaaggtagttgatatgataccttctacatctcttttgattttatatctagttgttctatcaattgctgagaaaagggtgttaaaattttcaactatgattgtagaatgtctgtttcttcttttattttgtccattttctccataatttttgaagctctgctattgagtacagaaacatttttgattgttgtgtctttccatatgaaatgtgtctatctctggtaatattctttgtcttgaaattgacttcactggatattaatacagatgtagacacttcagtcttatgcttactattttcatgaggtatcttttcccatcgttctactatcaatttgtttttatatataaagtgtgtttcttttagacagatataaaagtgtcttgattatttttttccctcattctgacagcctctgctttttagtgaagtaattttagatattgtatttatcctttgtggagtttgctgagtttcttgaatctgtaaatttatatatatattttttaccaaatctgggaaaattaggggccattacttcttaaaggattatttttctacctcaatctttctttcctctccttttaagactgattatatatatatttgatatttggatattatctgtcctatatatcctggatgccctgtctgagttttcccccaatattttttctttcttttctttagattggatacttcctgtggatttgtcttcaaatttattggcattttcttttggcatctctaatctgccattccattgaatgtttttttcagatactctattttttacttctgacatttttatctggttcttttcatagttattttctgctgctatttcctatctttttattcgttacatgaatattttctgttaacatcctttctgttatgtccagttataatagctgctttaaaatccttgtctgataattctaacatttgggctatcttggattggttttcattgatggtttgtcctcttgcatatgggtcacattttctgtttcttcatctgtagaataattttagcttgtatcttgaacatgtgattgatacattgtggatactctaaactctgttatgctcctccaaggtgtatggattttttcatctgttcgttgaagaatacagttaacttggcttactcaaactctgagccctgtcctctctgcagtggtggaagatgaatcttgttcagttctttaaggctcagctaggctgcttagggtctgtcatgctcatgtgtcattatggggcccaccagggattttgactggatttatacatagaattttggagctttccttctgtggctctttattttcttacagtttctgttggatgcccttttccattctctgtgttcctttggtcactcttcagtgcttattgtctatgtgtccagaattttagttgttatctcaggaggattgttctgttaggaattaattggttctgaccagaagcagagcctgagtttgtgttatattttgaatataaagcaaacgtgatttgctgatgaattggatgtagggggtggtggtggcaggggcgtggcgaaagagtggaatcactatgattattcattttttggcttaagcaactgggaggatgattttactcatttttttgataaagaagactgggagaggagcccgtttggctggagtacagaggatgtggaagttaagggtttcatttagatgtgttaaatttgagatgctttctagatattcaactgaaaatgtcaaatagatagttagatatttagaatctggagctcaggagtcctagagatccagacttagtcatcagaatataattgatatttgaaactgtgggactacatagctttacctagggagaacttagctggtgaagaaggggtgcccccagcaccatgctctgaggcagttcaggatttggaagtcaagcagaggagaggaactaccaaaggagaccaagaaagagaagcctggagaggataggtcacagaagtcagagaagaatatttcaaagaaggcatcagtggacaactgatttgaatgctgctgagaagtcaataaggtgaaggacaaaagagagagccttggattgggccagacagagatgacttcactagaccatctcactacaatggtggtggaacaaagggtgggcgcagaagcagagactatgacacctgtggaccaaaagtgcttgctcttagggctcaggttatttaggcttccagttcacctgggagctgtgtaaccaccaaagcagaaagggactacaggtctgtgaatatttattattgatgatagtgtttctatcctgcagtagggaagacttttcaccttgaactcagacctttccctgcccaggttacctggacaaccaaacttccggggtcagagatggcatttgctatgtatatgctgcaataggatgtttgtttagagctattggtagtcgactgcatggtctttaatcagtggtcttactgattatagaaagtgaataccaaattacagccacagatgctttaggctcttattttgcataccaagagttaccttttctgttgtcaagttggagcttagaaggcacaaggctcttagtcaagacagtgttgtggttcagagcatgatttacccagaaatgatgggatttgactgttcatgggaaggagcttccacagaatgagcatttgtttaaccaggtgtcaatttgctttgcaggtttcttggaacatagacttaaatttcattacacttgttttcaaggatcatcattccatgaagtcttattatcccttgaggctgttcttatgtagaggcagaaacttttgcctttggtttagtgatagtctaccattttatcctagcattctggcattaacctttggatttgcctaaagcaaaatacaacaaaaggaatcagccaagccaaaaatctttgatttattttccgactctccttcggattttggtatctggcttctgttactttgcagctaccatattcacatctggtatggtgcttggacatgttagacttgttctcctgaattgacttagaatggttaagccctggtcttttggctatgttgacattactggactgattcttcataaagattttcctgttggatagagtatcagccttccccagtctgcctgcctttatgtcaggttttattgtcttcttcaagaagactccatgtgaatttcagccatcacagtgtaacactgatgatctttcaggacaattaagatgttcctgggaatttctcagcgtgtgaacctgctagccctcatatgactcatgggacctcagtgtttcacgtaccctttttccctcacctgcatgactgtgcccttatctttattaggagtctaataaataggatttgctggttttgatttcaaagctgtgaaagccgtactataaggtaaaaggtaacctttatttctatttagtttgtgaaaggaagtcatatgtactaatcagtcattatagtgaagatctttgtgacagtttccctccgagcttcatatttcatgtatgttttcattctcttcttgtcttttggattaaaagtatttctgtaaataaattgggaacaattctgaggtccaggaccttctgttatcaggttagagcattgggagccatttccacataaggcaaatatttctaaagcacagtttcattatttagtcatttttaacaccaaccaggttacctttgctgaatacagcaaaatacacgatttgaagtcaccagtcacctgtctgttaatacttttatagtgcagctgaggttccaacctgaaaagccaatgctttcatctgtgggttaattcctttctataatacttatttgctttagttgatttttgaaaaatctctttgcaggaattctggcagtatatttttttcctccttgtagttttggaacactgcagttgagtgagaacattccctatcctaactcctagaactgaattacagccaaattgaaatgatttgtgctttgaagaggagaattggcaaggatgcatggtctatggctcgtgtattgtaagataattgtaaccatggcagtgtgtgtttcctaatattatgtttctacatttaagtgatgagagtcatcatagggaaaaaatccacttgtatgtttctagttgaatttaaattattccaacttcattattacaacattagaagtagctgtttcctgtggaatagccggttcagtaatttgctttatctcatgtgcaagtggtttctgcctgggccagtaatatattttaataaggcaagtttccaggaagatacaacctaacaatgataactttaaaaaacctagataaaggaatatgaaaaacttgataatgaggaagaccgcctttgcagaagtcgacaaatttatgatgcctacatcatgaaggaacttctttcctgttcacatgtaagtatttcttcttactctgttactttagtactgatgaataagggaccatgttcagcgtttccagaatgaaagttaaacagtagaaaggtgtttaaaattgaaaaatgcacgcccgggatggatcctatttcttctgctttgttgtttcctggtaatattaccacgatgtgtgttgcttcgtgtaagcttagtttatttccaaaagctgatactttcactgcaaacatcaatgaaataaaattgctaatttagatcaactgaagaaaaagtctcaattcaagacattctaaaggaaattaagctttattattttaaaatgagctatactttaacaattaagctaatcagctattgataaatataaattttaaatggtctctttgaatgaataaagtggcttataatcattgtgttaattttgtccattaatagttcaatagcagttgtaatatttttttttccttgtaaatcagataaacaatctaacttggtcattaggataaactaggttattaggaaattattctatcaggagtaactggaagaacatttaccatgtaatatctctatattaggaatgttttccaaaaggtggcctgacagtcctggcctgctgtatcaacgcagcagccactagctgcatgtggcaatttacatttaactttaaattaactaaagtcaaatgggagtaaaaatttaatacctcagttcctcatgagccacatttccagtactcagtggttacatggggctagtggcttttgtattggatggcacagatacacaaccctcccattgtcacagcaagtcctattggacagcactggtcatggtattggtgtattttggtgcttctgtattcattgtttatgtacagttcttgctgacatttgcataactgtggctaaagaggacgtctctttcttgcggcatgcactgctctgttccttggacccacctggcttgatgaaggaatttctgggcctaggactaattgttgctactccatgccttgctgcctcagtagggaaggactgaacccttgaagaatgccagatgttcaatgggaaagcctccgtaaacttagtttttatgtagttcagcagtttagagggtgtttattcgtatgatggtacttttaagcctttcttcttattgtacattattaaagaagacacaatttgaagtttggagaggggaggataccattttaatttttatcagtgggagctccatttttttccccctagttcccctcgctgtggttacagtaagactttccttaactagagccttttaccactatggcttgactttgtaatcctgacattaattcttaggggtatttttgtgtattttctcttatttgatggaaattttatctttttacaaccccattatcagtttgttgatgaatgtatgcatttagggcccaaacaatcctcccatctcagcctccagagtagttaggactacaggcgcacaccaccatgcctggctcatttttatttttatttttatctttatggaaatgaggttccactgtgttgcccaggctgatcgcgaacttctgggctcaagtgatcctcctgcctcaacctcccaaagtgctgggattacaggcatgaaccagtgcacttgacctgataataggattctttacactttattatcagagtgatcttgaacccttctggaattgcataatgtcagcccctgcatggtcattcttctgggcatgtatctaagaactggatgcccagaggaacaagcatttgctgcgattgcctataaatactcaacagatttttaaagaatgtttgttaatataattaccgtaggttactgtttagtaattgctgtgttaaatttatctgttgtgatattatataacatacacagattggttacattttattatttaaaaatattatttttgactttgatagcctttctcaaagcaagctgtagaacacgtacaaagtcatttatccaagaaacaagtgacatcaactctttttcaggtaagataaaattattccaaaataaatagataatatttgcttaacacttggccttggtgacattctttttgcatgtgcaattacactagaggacttgctttgtaaagactgtgttctattctggagctttgtctgggactatttgagtttattatcgcttatcttcccattgcaaagtgtccttctaccaacgtgcttcctaaagccttttctgaaaaaggtcattagagctttgtcgtaacattatgttctagaaatcagtcaagataagacatcagagaagcaagtttttgcccatttgacattccagcacctgtgatgagcaatgactctacaagatttattttgtagtgccaggctgttgatacttgctgtgattatcctctaggggaaatacaatttattttcaagattcaggagcaaatgtttgagtgatctttgagtcatgggaaattgtattttaccttggctgttcatatcttgaacacaataccgtcatacaggtttaaatgacaagacttggaaaatcagattcccaactaataggcctatgtatttggcattccttagatgaggtggtttcacttcctcccaaaagccttttccatcctgtgttttttatagaggtggcagtggtttacaaggacagtcagattctccaatgaacaaagtgcttttcatgtttctataaattacaagaaataggaaagaatgtcattgagtaatataatggttttaataagtgaaaataatcaactcatctttttcctggataagttgggcatttaaagggaggtaagttgactttggcattttttttttttttttttttttgagacagagtctcgctctgtcgcccaggctggagtgcagtggtgctatctctgctcattgcaacctccgcctcccaggttcacgccattctcctgcctcagcctcccaagtagctgggaccacaggtgcccgccagcatgcccagctaatttttgtatttttagtagagacggggtttcattgtgttagccaggatggtcttgatctcctgatcttgtgatccgcccgcctcggcctcccaaagtgctgggattacaggcatgagccaccatgcccggccaactttggcatcttatgatggtgtttatgcaaaatgaatttgattattcagcagagcaaataccgatttggctcttagagcatatttagatagtaacaaattgggtgttacctttctgtgacaataattagatggactttcataaaatgtaatacctgtctggatagtagtgggttataagcttgggttatgaaattcattgacctgacctggctttgagtcccagggccgtagctggaggaccttgggtaagctcctccaccttcctaacttcagttttctcatctgtaaagtggaaatgacactgcgctctccctgaaagggaggtcttgattcagtgagaagggtgcacacgggttgctttgtacgaggcccgcctatcactgtgctccacaaatgttagctattatcacacatcttacagtcagaaagtacagtgtcaatatctgctttttgttgtctccatgatatttgagtgtcagaatttcagttttcatctgactttgccatggtacgtagacagccttatggtcaattacatttaacattgctaaaccatacctcataatacatgggttttacaaatctgattttagcttccactataacataaataacattgaaaaaaaattgttccagttgagatacaaagaccactaggattctttcataccttcaaaaaacattcatttagaagcaatttctttcatatatcttttaaaaaacactttattgatttgttttgttcattaaaaaaatagtcaaaattttctggctaaacagatatagaatgggtattattcttatttcagaggtgaagaaaatcttataaagtttattaaaataaggagtatattaatgcaattctatgtattatgtaccatcagagcataatgactaaagtataagtaaaaggtatatgtctgaatgtcctgtttacagaggtacattaaccagtaaagtcagttgaagttcatagtaaaacaaaactgtttttaaagtaaatacgaatgctttttattaaattctttttgttgtaagattgcctttagaggtaagtaagtgcataggtccattggtggcgggcttgggaggggccctagcttgtgcttgagtgcttctaaaatgcactgtgccctgagctcggctctcagtattctgaatcttaccgaattctcacgacagccttacaatttagatacgactgttctcttttacagattaagggaactgaggatcagagagggaaagtagtctgctcctcatctcactgttgaactctggctttcatactccttagcaagcctgttgcggttctttctgttgaaaagtggcagcatggtagattctacgtagtcttaggaattcccagtgacactcatcttttactttattagcagaaagtagggatgtttgataaaatatgaaagaaaaatattaattgacataatagcttttataaatagaaaaatctgtgatctataaatgtagccttttcttagatctttggacatttgaatctatttcgtctcttgactcttttgaacctcttgagacttgtcgaggacttggctaagatagatgttgtgtgtttcctggaatcaggatttcagagctggaaggaacttcagagagagataatttagcttcctctttcaccacaaaggggacaaagtccatatggttttcgcaactagctccagtgccttccccaggacagggatagttctgcaagttggggtagactggctcaccccccaccaccgccccctatcccgcgttgcccgccaggctagcgtcctttctgcttgcaggaagcaaggctcccagaaggactgcagctgcctcccagcccatgtttggttcctgtggcttctgcagacttcctattctcatcacttggtttgtactgttccatgatgtagtttttcttttattttgttttgtaaactttcaggatgatctatgaagacataaaaaaaaggttaaatttggatcattcaatgagctgagggtgccaaaatgtttcccaaaactatctaattgactctgggctgaactgtgaaatattgtctctttatatttttatagttcttgattttaaaagttcataacatggaaaaggaaagctgatgctgtttattcagtaatgggtaaagtggcatgaagttgaagtagatggtagttgttctccatgaggggaagagcactgtgcatgtgaaccaggagccctcgccttaaccccagtttagccatggaccttctcagagaccttgggagtgcacctgcctgcagtttggtagccttacctgtaagatgaggagtgggattggatcaactctcccctgtggttttctctatgactctaagagatagaaaatcaataaataaaatagctaattaaaaaaaatttcacttcatggacctattagctttgagtttttaaaactcagtgcagattacagatgcttttattagcttacaagttgtgccacataacttgtggggcccagtgcaacgtgaaaacgcagggctcctcatacaaaaatgattaagaatttcaaaatggcaacaacagagctttaaacccagcaccaggcttttctgagtcacacttccatgaagcgagccctgctcctgtaagaagtgtctgtgacttgccaggagtcatattaggtagtaggaatatagtggcaaacagggcagacttgtctgtgtcttcatagaatcaagtggtgtagataaatattgatgaatgcattagtgaatattagacaagcacggagaagggcaggtaccagacacaatgctatggggagtgcataattgggaacttcgcttaacctgagtctcattggtttgtgtttttttgatacattccgattcattcaccgtggaatttcttttccatctcttccagccatacatagaagaaatttgtgaaagccttcgaggtgacatttttcaaaaatttatggaaaggtatgaaactttatgcatatatatacacaattttttatcatgtacgtgtacctcatcttatgccgtaaatgctgaccttaaaatgtgtgttaatcatttagcaagtattcactgaccatgtacgatgtgccaggctttgtgttaaactgtttcctcagtactttacattataattttagggtttgtctatcttaacatctctttgaccttcaatttctcagcttcaatagagtctaaaatatacactgaggaacctcaattttaaaaagtatcttattgagagacctttgctaataatgcaaacttgactataatttatctgattcatttgcttggattttggaaacatgtctcccaaagcaggacaagcctgtacttgattcttcatgtaggagtagaatttaaggacataggtcaatgtctgtttatgatcgtgtacatcattaaatacctaataaatatgtcccttggttactcaaactatagatctactggtcaattcttcagttttttgagtatgtctctgtgacaatgcaccactgaaattggaccctctaaaacagaatctgcattgacactgactttatcagcttggctaatttctagacaatatacgtgatgataatatctcatgctagagctttctgcagctgctcagtaattgcactttaagaacaaatgctactttactgtagttttcttcaccacatattcacagaactaaagcaattaaaaagaaagttgtgttgcaattctattggagttcaagaggtaattttatcctggagcagagtcaatatgttgggaaactaatattcttacagacgattgtacttttctgagtaatagcaggaactttgccaaaaagcgccagcatcaaagggagagggtgggctgctggctcagggctgagttgcagccaagtcctgggccatctccatggctgttggtcctaaaatctgacctttcccaactcttgggtaaacctaacttttgtgtgatccttaagggagaagggagagaggggaaggtaattgaaagtggggaagaggttctcccatggatattttataactttgccatgcatcctttcacttgaaaccaggctcacagatatagtgattttcgctcattgagacagtcatttcatagcctcacagtaaatgcaaacgatgccgtttgcattttaggcaagcaggcacatgggattttctgcagccattacaattttctgtaaataaattatttttaaagttgatttgttaatttccatcaaattagaaaaaagaattcatgtcaggtgataagtttggagctttgattttgaaaagcacagggactccatcaatatggtcatgtagcctttgacctcatagggactgggcacacgaagggccccatggaaaaggtgatttttccatgaccaccctgagtctgatggtaaagagggagccatcagcaatgcagggacatgtgcgatgtcttcccaccttccctgaggtccaagcagggctgtggggctgagttccaggtgaggcagaattggagagggcagtggaggctttccctcttctagttgagagctatgcgcctcattcaggcagtgaacttcagttgctcagcaggacaacgactgagtcaggaatcagagttaaaaacacttctcctactccacccttactgcatcccaggcgtttccatgtctttaacctctgatcttctctccaagatcctttgaagtcatttgcaagggctctagctacctgaagccctatcattgtctgggctctttcctttgtcacagttcccctcctgtcaaaagtgtcccactcagtaaccaggcattgattgggaatagcactcaaataacccccgtggagacaggactgagcctagatactcagggccatctgtacttcctaaagaggaacttgttacagcaaatccattcttagtgggcaaaatatgtaggcacttctctcttccttgtttgttaaccctcctcagctagttgtaaaatgtgtcagatttccatcccctgtcaccagctctggactccagaatctgtgagaaaagacagtaagagctagcctcacaaaccaagtgcatttcaaagaccagtcatagatttataaatgggagtgcacccaaatgtggttttgccttttgcatgcaccatacttttaaaaaataggttgaaataactcttagaaagtctcaaaacataattttaattgaccaacttcattagacatgttaggaggatcagtgaaacactctttgtgagtcattttagattcattgaaaaaaagatgctattgtaattgcaactattcctctgcttttgatttttaatttgattgttagcctcagaaatatgttaaagatccttattttttaaaaggtctattggtcgggtgtggtggctcgcccctgtaatcccagcactttgggaggctgagtcagcaggatcgcttcaggctagggcttcgacaccagcctgtacaacatagcaacacccactatcttcaaaaataaaaattaaaaactaatagcttagtgcggtggtgtgtgcctgtagtcctagccacttggggggctgaggtgggaggatcacttgagcctaggaattgagggttgtatcgacctaggattgcaccactgcactccggcctgggacacagagtgagaccctgtctccaaaagaaaaaaaaaaattgtaaagctcattaaatgaagcccctagggaactgtgatatttggatgtctttaaggcattccagtatgatgctaatattacctataactcccttcctcccttcctcccttcctccctctctccctgaatcctgtgtctgtgtaaggaatcatgccaggggcaaaatgagatcgaaccatcaccagaatgttctctacgaagtattcaatctagaatgcatttcttttgaaaatagtttaaaaaacaaacacctggccgggagggtggctcacgcctgtaatcccagcactatgggaggccgaggcgggcggatcgagaccatcctggctaacatggtgaaaccccatctctactaaaaatacaaaaaaaaaaaaaaaaaaaaaaattagcctggcgtggtggcgggcccctgtagtcccagctactcgggaggccgaggcaggagaatggcatgaacccgggaggcggagtttgcagtgagctgagatcgcgccgctgcactacagtctggggacatagcaagactccatctcaaaacaaaaacaaaaaacaggccaggcgtggtggctcaggcttgtaatcccagcactttgggaggctgaggcgggcggatcacaaggtcaggagattgagaccacggtgaaaccccctctctactaaaaatacaaaaaattagtccacgtggtggcgggcgcctgtagtcccagctactccggaggctgaggcagaagaatggcgtgaacccgggaggcggagcttgcagtaagccgagatggcgccactgcacttcagcctgggcgacagagtgagactccgtctcaaagcaacaaaaacaaaaacaaaagacccaccttacagatatattgctcattaataaaaaacgtaatcaaaatgtctttgttaaatagatacaggatatatctttttcctcatggataaagaaaacactcatcaagcagttgagtgaattgtgggagcatgtcagtgtggtgaacctattgcctcttaggattctagtctgagggtttctcttctataccacctgtgtctattggtctgggttcaaattccactctcccactctgtcactgtgtgaccttggccaagcctctgaacattttgatgccttggtctcctcagctataaaatggggatcataatagtacctggctgtagagtctgtaggaggaatacatgagcaggcctggcacatggctactcttagaattatttgtaaacattaattttttgtcttagagctgtgctttaaaagccatggctgtccaatatggtagccagtagccagatacagctattgaacacttcaaatgtgatgagtctaaattaaaatgtgcttttaagtgcagaatgcacttcagatttcaaagacttaatatagtaacaagaatgtagaatatctcattaattcatattgatttcatgttgaatttttaatatattgggttacataaagtatattattaaaattacattatatatgtggttcatatcatctccgtattggactctgctgattcagataaaagtggtaccatagcttatgacaattaaagaagaaacatgaaatctttcatttgaatcatgaaataaagccatgaatacgggtgaatgctctgtgaaaaagggtttcagaaaacttaactttatttgacaagcaacccaagtaatgccgttctagtctgtcttacggtgttgttttgtaaatccagttaatttgatatttaactttttagtaattattttattctcttttagtgacaagttcactagattttgtcagtggaaaaacgttgaattaaatatccatgtgagtatcatctttttcttttttcattttttaaataaaaacttcctctggcttaacctcatgagaaaatacttgattctggaacgtactcccagagggtccactgcccaaacagatgtctgtcttacagctttaagtactaagcattcaccctcccatgcttccttataaacaatagaagctttaatcctttttcatattcatatgagaatgtgcttgtttatgtaagatattttaagaggtaattgactctttaacaaaaatagtagtaaaaatacaaatcttttacttaatataactccttcatgtccttgccttctgccattctggtagagttccttttctttttcttattattagatataataatacaaattgagtatcataatgaaaatgatgacatcttttatcagaccaaggcttcatcttcttttttatcattttgagagtgataaaagcaatcttccaatacaggccacgttctaacacgtcatctccttagtgtttcatctactttaagttttcaatttcagtcattcttattgcatcatccttattgcagtttgaaaatgcacacatttctttgcacagtctttcttacattctgttttataatctcccttctcataggcttgcaattgggcaaaacaatcaaccggaatttttttttttttttttttttgagattttttacttgaatggtattgttggaagaggggctttttttttttttgagacgagtctcgctctgtcgcccaggctggaatgtagtggcgcgatctctgctcactgcaacctccgcctcccgggttcacaccattctcctgcctcagcctcttaagtagttgggactacaggcacccgccaccatgcccggctaattttttgtattttttagtagagatggggtttcaccgtgtttgccagggtggtctctatctcctgacctcatgatcagcccgcctcggcctcccgaagtgctgggattacaggcgtgagccaccgcgcccagcaggagttttgttttttttaaaaatacttgatcttcactaaaaggccaagaaatgatctatttttttttttttcaatttctaacctccttttcccatcatatttcctggaaggatttagaagcaagaggcaataccagatactctaaaaaccccttatatctgctctgggtctttcatacgcttctgcctcgggagaccctgtgtccttgtggactctgagaatcaaacgtgaagtctgtggcccaaacgcaggtttctataggatgttttaaggttgtttgggggagcccttaaagaatcccacccttaatttgccaggatatgtaaagtagtaggtacttgctattgtcttacggcctcttacgtgaaatgtcagattcactatctgtctttgtgccacttaacattattaaatctaatgatgaagtggggcattactgagatattattgactgaaggaaagtgcttatgaatacagcctctgtatatacttcactcacatttagccttgtttcacgctcacatggccagcatgagtcctctctattcactgatgttaccaataacaaattcacatggcctgcatctgttgggtttcctgatcatatggccttgtatcatgaacacatagatgcccctgacatggactctcatttttcaactctgacagttctcggaagcattggattgttcccaaacattaggcttcggagtagctaaggctgcttttcattttgattagacatttcacattcacttgtcctcaaggtatacatattgtaatctgggatttgtgagagtggagaaacagttcggcttggttccactccatcatcttcccttgtgcctccatttggtgcctcgtttatcctggaggtggagctgagggaggctgtcaaaagtcttgccacccctggggcatctcatccttcagcttaaagactcagtcatgaaaagggtagatccctaagtcagattgctattttaattactgtctatgttttgcatgaaaaaatctttaaaacaccatagctttgtgtaatcttatgttttcattttgtgtttggatttcccagttgaccatgaatgagttcagtgtgcataggattattggacgaggaggattcggggaagtttatggttgcaggaaagcagacactggaaaaatgtaagctttcaatgctcttatgttttactggcactattaaaattttaatatttgcatgaaaagaaaattcctataaagaaatgtggaaacctatgacatttcttttgaagtactttacctccaaaagaaataagctgtaggccgggcgtggtggctcacgcctgtaaccccagcacttttggaggcagaggcgggtggatcacgaggtcaggagatcaagaccatcctggctaacagggtgaaaccccgtttctactaaaaatacaaaaaattagccgggcgcagtggcgggcgcctatagtcccagctactcaggaggctgaggcaggagaatggcgtgaacccgggaggcagagcttgcagtgagcggagtttgccactgcactctagcctgggcaacagagcaaaactctgtcttggaaaaaaaaaaagctgtattttgttaagcatggggaatgagagcaataagctggaacctccacctcttagggccaaatgggaagttcaacaataaccttgtatcctgtgcccaagatggtgcgggttgtgggtgggagccagggagccagaggtgaactagaagggatccttgacaactgtggcatgttacgttcagcctccccatcagatcacatgacaaagaattgtttgctttgcaaaagagagacattctcttttaaataaagactcaccgacgatgaagtgaagcataagccgttgtggcatttcagatgctggttcgctagatcagtagctggggtgctggagaggaggaagccctgtggacaatgatcaccgatcatgggctccatcactcaccttggttaacgtttttcctgggaggtcagcattcagaaactaactgcatctgagctgggtagaagggtcttctggagagtgaatggtggaattcttaagtgtgggggaacatttttttttttaacagaagtggcttaagacatatttctgaaagcaaaagatagtggaaaaatatgatttgatagatccagaactacaagtttggttaagtgccaggcatgttagagcagtgggcttggtggagtagtatagtgtgtgaggcttggttataaagtaattgagtccgtgggagaaggggtgtttgaggccccctaattcagtgcctgcctccggtcagcctctgctcaggcacttcctgggattgggagctgatggctttgccaagaagtcctttccgttctcagacaggtccaatggatgatatgttttttgaggactgaaatttacctttgttaatttgtacccattggttgtctttctactctgggggcctgggcagggcgagcctgatgcccggcactcaggagtttgaagtctggggtggtgcccaagcaatgtagcctagggatctggagtaagggtcctggtatcacacctgctacgtcaggttcaccctccacactttctgccttggacaaagtttgggacctctcaatgcctccatctcctggtctataaagtaggagtaataaaagtgccttgttatgagaattaaatgagattagactttgtcaggctttcggaaggctgcttgttgtgtgttaagtacaaggaaattagagtatactgaaacacagtcctctgcaaccctggtcagtttcactgaaacacagtcctctgcaaccctggtcactttcactgaaacacagtcctctgcaaccctggtcactttctcatggaaaagttctttcttattctgtacttgcacagtgcactttttcatcctaagtgatatactctacttgttgcttggcaccgttcattaatttctgctagttttgcttcataattgtatttagaatatctagtcagacacttgatgttatagaagtaaataatatcggccgggcgcggtggctcacacttgtaatcccagcactttgggaggctgaggtgggccgatcacgaggtcaggagatcgagactgtcctggctaacacagtgaaaccctgtcactactaaaaatacaaaaaattagctgggagttgtcatgggcgcctctagtcccagctactcgagaggctgaggcaggagaattgcttgaacccgggaggtggaagttgcagtgaaccaagattgcaccattgcacttcagcctgagtgacagagcgagactcagtctcaaaaaaaaaaaaaggaaataatatcaacttatctctttgtacacatttactatttcacataactctcaaaaatagccagtgggtagtaaatattcttctattctatagatcaagtgtagatacttctcaggagccatatagctagaaaggggtcaagtcttaaggcccacgaaccctcactcatgtctgttcctgtcaccaggctgccagttgcatgcacactggctctgcgagcccatcagtgaaccacaaggtgcacccctaggagcctgttaggtagctctttgataccttctaaacagaggcccaagaatgcacttgcttcccagaggcccgaggcctgtgtgctatctcctttggtctgcaatctaaaggttttattaaaaaccaccaagtgcagtggctcatgcctgtaatcccatctactcaggaggctgaaataggaggattgcttgaggacaggagttcgagaccagcctggacaacataatgagactctcatctctaaaaataatattttttaaattagatgggcctggtgacaggtgcctgtagtcccagctatgctccagctactctggaggctgaggtgggaggattgcttgagaccaggagtttgaggctgtaatgaggtacaatcatcccactggactccagcctgggcaacagaatgagaccccatatcttaaaaaaaaaaaaaaaaaaaaaaaagaaaaggaaaaaaaaagaaaagaaatcaactccacatggaagagagtggtgatagaggtagtgtaaaacattttgaaaattcttttaaataaaaataagatatttgaagaacatatcacttcatgtgtttctaacatttgatcccacatgtaagcaaattaatgtcttgccaattgatttgttgtaagaactcgtagaaaagtggataaaaacaccaaatttgaacatttatcttgtttttatataacttaaacatgataagttatgatcaacaagaaaaaggtagattttctgtgtctgctacactgagacagtgtccatgctgcagatccgggctgaaggaagtagtccatcatctgggaatttagagttatacacaagaactttcagcctgtgaaacgtgtgaaaacacttgcaagaattcccttttagccttctgttgtcctaccgaaaaagcttcctgttttctatagaatatgccatataacttgtctgcattttctaaatatgagtttgttccaggttttcaaaaatcttaagttgccaattggttcttctcaattgacttgcctcaatgatagtagaaaaatcttattgattctttgtattatttaaaacgtcataacttaaatatcaaaattaaaaataaatcaataaaatagcattttaggacatgctgttttgaattcatgccttccctttccattttgttgatcatcactgttttagattcttaacctctataaactcttataaaaattgaccactgctggccgggcacggtggctcatgcctgtaatcccagccctttgggaggctgaggtgggcggatcatgaggtcaggagatcgagaccatcctggctaacacggtgaaaccccatctctactaaaaatacaaaaaaattagccggtcatggtggcgggcgcctgtagtcccagctacttggaaggctgagacaggagaatggtgtgaacccggaaggtggagcttgaagtgagctggatcgtgccactgcactccagcctgggcaacagagtgagactctgtctcaaaaaaaaacaaaaaacaaaaaacaaacaattgaccattgctgaattcacaattcctagctgctaaatatatacatatgcccttattagtcataataaaattatttatgtccatctactttatcatttatttaactgggacttctatccatttaatgatacaaatatcttttaagtattgcttgattttgttttcacaatacatgcaaaataaaaatacttcttgcatggcgcttgggtattactctgcttcttttaaacatggcctaaatgttcagaaacttgccccagagtgacatatattgtttaaattagtctagatatatttacggcatagatttttcaataaatttatgtttctaggtatgcaatgaaatgcttagataagaagaggatcaaaatgaaacaaggagaaacattagccttaaatgaaagaatcatgttgtctcttgtcagcacaggagtaagtattcaatttccagcatttcttttaaaaatgttttgtttgtttcatagcaggatgatttattatttttccttctagctgattgcaaggccagtgagttcttgggtgggttagaatctgatagtatctctttatttgattttgcaagttagaagaacaccagccacctccattatgcacacccatggcttctccgtttagtgcctatttatttgtccttgacttccttctttgcagaatatggtagtagagatggcagaaaataatgatagccagaaaaatcactggaatatagtcaagacctgactaaacgactggcaagaaggactaacctagaggggaaaagtaagagaaaagtggcttctgtccttcagaagcgaatcgagagaagcgacttggattactcacatccgaattgtccttttgagattgtccctagtcagcgtttcactggaaggtgatcttacctgcctctcactacctgctactctgtttatcagcctttccatttctagcaccatatttctacttattggacactttctttgtatattaagctatcatttttagctcaacatgtgtgaccccacttttaccctacatcttctttacttactaaatagctgcccattccaatttctttttctgttaatggtattacccaagatcaaaacctcagcttttatgtgtctgtacagatgccagtgtatgtgaagacacatccaaaaaacccgtcctctcagtaccctgttacagcgtgtgtgcactggtatggctgtgacctggtgttcagagtgggttagggagtcaggacagagagggagaggcatggggtgagcgtggaggggccagacactaactaactgtgtaccccacatgtgaatgaaaccgtagatactccagccaggaaggtttatattcagtgagaaatgtgcgagacttctagatcccatggctggattttaagtaaggtcttcaccaaaaggatctgaaaaaaccaaattttagtgggtaatgaaagaatccctttcaactgctgagcaagtaacctgagacctagagaggttaatttccttccccaaatctctagactttttggccagtgctccttttatcatcactttataggctgtatgttttttcgtttgtcacctgtatttattgtattatggtttatattattctgtcattaaagtgtttctggaagaggtatttgctattgaagcaaaagaatagcataatgtagctaagttacaacaaatggaaaccccatagccataaataatttctaattatgtgccttgacctcccactgtatgggcattaagcatttcaaataagagttgctttgtgtgtgtgaccaagtttttaactgatgagaatggaaaccaagcatcctgcatactctgttggagtcagtgtgaatggcattggcttttaatttctattggaaatgtctgtatcctaaatttcaaacgtggatgtgagtactggatgaagattttaagtggttattaaaatattaattttcagtgagttatctcaaagccttggatatttattctcaagaaagcctatagaaaataaacgttttaatgttggaaaaacataagtatagttttcatgtaatatttttatattgatttgactcaggtgagaggagatgtggttaagtggttgtgtagtttctcactggtgtaaccctaaaagagtaaattaaaaaattagggttattttgggctatcactttgaactaatttaaaagaattatttgtattttatttagatatcaaaactgtatggtatttttaaaatttataaatgcataatttaacaaaaataattatagtaaagttatttggaattgtttttgctaatcaggggatactttctatagtttttaataaaacttagttgaaaataccctcattaagtgaagcttttgatcagactgtatcggcaggctttcccgtattgtggacatgtaactgaaatgcattcactcaccacagttttctttttactggaaggtttttttttttttttaatctcaacttgagtattcctacccatctccccaaaagacagtaggaagtactgttcccggttttcttctgtaattctcagatggcaaaaaaggaaatatgcatgttggagaaccagcataagcgtgtccacagctgtgaagagcagtcagcaattcatccagtcagtcatttaagttcctcagaagcgtgactcatttattccctgaaccacagttgaggatttaggttgaaccaggcactctgcggcaagctgggactgtggtcccagttcttagttctcatacagctgcatggaaagggaaaagatgtattattcaaatgatgacggaaatgtatggacaactgggacctgtggcaagagctatggaagacaggcacacagtgctcggaaggcctttcgcagggtggagatggggtcagcgaatgcctttctgaagttgggggttacctggagaggagccagtgcacgtggctcctctgagcccaggcacgtgaggttgggggaatcagatgaggggccagggtctgcggtggtggggggagtcgtgcaagacaaagctggagagagacatgaaggccaggccagaccgtgaagggcatcgccggccgatcttgaggagcctaaatgatctgactgcagttagaaaccaagtgttttaactagagagagaccataatcagccttgcagttcacaaagattgctccggctgcagtgtggaggattttcttcaacaacgacttcatggtcctgttttatcacagtttttttatggcgagttcctgcaaaatgtaagctattttgttgacttttagtaggaaatcaaagtagacagttccttgctcaagagttttacttaatggtctacttctaaaaatccacttttattctgacttgtaatcaaggcaggccgtcttatccataattatccttggaactgtatcccacccttcattaaattgccacttattttttcatattggtcagtattcggttgtgtcctggactccacatgaaacccattatagtgtctgttcagcaccccgagaggtgagggttgcagtaactgatttctgtagagataaccacatctgattccttcacctgcgtgtttattttacatcgagtcaaagataaatatagttggactttagttaaagcatttatttggtaattaaaacagcatttatttggtaatgactagacagtaagagaaataatggagctccattctgacttgtgcagaggtgaccggatgttttaaagggacagtggcctgtggagtgcaatgcgggctggagcagagtcaaggaagtgaagaattttacaatgcaggaaggggcatggtccatatgggacccatctgggtttgctaactgggacttatccaagttagactcctaccctcccatggaggctcggagataggggctctatctttgagtgtttgctggaacaaataaaaattctttgggaagccttgatttctctgaggcagtcattttaaggggggctgagcctcctagggatgtggtcttgagctgttagctttaacaatgcaaattctgtttacagattatgttgaaatttgaacattttctttggaatttaataattttttgtgttcgttaagaaacaagatatagacaatctaggccattttaaaaactgaatcagtttagtgacaagtatacactttatgtaaagaatctaagtggatttcatagataaaatagatctaaatagagctaatagatctagcatagcactgatgaattttcataagggaatacacgcatctccggcacccagatcaagagacggaaagttaccagtattctagaaatctctttgtgcctctcccagtcactaaccctgcacccaacttaactactacccagatttctaacagcatattttagctttgcaaattgtgtttgaactttataaatgtgcccttctgtgtttggcttctctcactccatgttgcttacaagattcatctgtggtgttgcccacggctgtaactccctcctgtagctgtgcagcagaggtcagaaagccaggtgtggctcaggccaagtctagcttgttggccttattttatagagcccattacctaagaatggtttttacatttttaaaggattgtaaagaaaataagcaaagaataatagatgacagagattatatgcggcctgcaaggcctaaaatatttactttttagccctttgcagaaaacatttgctgatccatgatctatatggcattctagtgtataaatataccatactatccattctactgttggtagacattggggttatttcctggcttgtgctattttgaatgatgctgttttgaatattcttgtccaggtatcttggtgcacataagtacagattgctattagatgtctacctgggagtgaaatcactatgtcagaaagcttgcaagtgacactcagccttggtagatatcaccaaatgggttgctaaagtggctgcaccattcgttgtacacttccagtggccatatatgaaagttctattcactgtatatcttcccagcactcagtatcgtcagtgtttttctttttagctgttctcgtgggtttagtgatggcatattgtagttttaatttgcgttaccttggagacatcgaggttgagcatctgttcattagtttgggggctatgtggtatcctcttacgtgaattgcctattttttttccccatttttctgggggttggttgacttttttaagttgattttttaaagttctttgtatattatagatatgagtcctttgtgtatttatgggttgcatatatcttctcccatcctgtggcttgtctttttactctgttaatggtatcctctgatgaatagaagttcttaattttattttagtctaattaacatttttattgttactgccttttgtggcctaagaaatctttacttaccctaagatcatgaagatattctcttttgttttcttctggaagctttattgttttatcttttacacttaaatctacatcagctggaaatggctgtagcgtatggtgtgaggcaggggtcaaggttcatattttattgtacagatattcagttgctccagcaccactgattgaatagaccttcctttccccaggccctgttgtgtcaccttaataacaaatcaagtgaccatttatgtgtgggcctattttggattcccttttccatttcattggtctacttgtctgtccttgggctaataccacactgtctgaattactgttgctttctaataagtcttgatatctggtcctgtaagttttccagctttgtttgtattcaagaatattggaactttccttgactgtttacatttacatatattttagaatccaacttgtcaattttcatttcaattaagattgcatggcatctatagcttaattaggggaacactgaaatctttacaattgagttattgagtccttggtcatgataatagttttccactttcaaaagctaatttaattccatttttattctcagtgtttcaaaacaacgccacaaataacattcctccctccctgacccgtgctgtgattccattaacttcagaagcagagattgaaatgggtatttgaatagccagaaacaaaatgttgaccagcaaaaagcctggcaagatggtgatatgtttctgtatctagccttttgaagaggatataattaggatagagacatgattgaatccaagcaagaaaggaccttcaaggtcatctgctccaattattaatgttgtgtctctatgcattttattatgtaaccagctccattttactgtgactttaaaaattaccatataggtgttggtgctcaatgcatggggtggcagcttggataaaaacccacagcatatattgtatattaaaaaatagcaagaagagagacttttgaaggttctcaccacaaagaagtgataatgtgtgaagtgatggatacactaactaccctgattagatcattatacaacatagatatgtgtcaaaacatcaaactgtacaccataaatatgtacaattgcaatgtgtcaattaaaaaataaagtaattttaaaaatatgtagcatggtgtttggtggtagatgtgctttctaggcagcttttgctcttcttataaacttttattgtttcactctaggactgtcctttcattgtatgtatgacctatgccttccataccccagataaactctgcttcatcctggatctgatgaacggtaagcaaaacttggaaaatctgaatgccttgaaagactttgccatgatgttaaatcttagcatgcattaatctaggcagactggcaatgtgggtctttcaggtaattaggttccccctgaagtttgaggaaaccttttaccctttaatcttcactgaaaattcatttttcaatgttgactgcaacgtccttctgggcctcccagtctcttcccaagaaaagattctagaaaagattatcatgaaatacttacagtgaaacttgattttctggaatgcagctggcctagatctttaattagcttatttcctggccctcaacttttaggaatgaaatacctcataagaatataggccaaagatagaaatgtatttaaaaaccaactttgaaggactgactttgggccaagtacagattttagcccaatcttctgcaccttctaaatctgcactactgtacattgatcttttaaactgtggatgatgactttgaaaatgctggaaaacgttcagctagaaaaggagctttctgatactagaaggtgtcatggtatatatctaaagtatttttagtaacaagaactgaaataaagcatacaattcacaactcacatgcctagttttttttttttttttttaagttcacttgaagttttatcatgttctgagtgtttgatttaaaaccagatctagccgggcacggtggctcacgcctgtaatcccagcactttgggagaccgaggcgggcggatcaatgaggtcaggagatcgagaccatcctggctaacactgtgaaaccccgtccctactaaaaatacaaaaaaattagccgggggtggtggtgggcgcctatagtcccagctactcgggaggctgaggcaggagaatggtgtgaactcaggaggcggagcttgcagtgagccaagattacgccactgcactccagtctgggtgacagagcgagactccgtctcaaaaaaaaaaaacaaaaaacagatctaccccgaaacaggaaggaatttcacagcgtaataatgagcaaaagaagccaaacaccaaacacagcagcatctaccctaggtaaccctgcttatgtgactgccaaaacaggcaaaactaatggatggggagagaggccttaaaagtggcctttgtgtgagtggggcttgggggtaaggtcttgactgaaagggcatagtggtaggggagcttttgggatgctgggcatcttttccatcttgatgtggtggtggttttacaggaatatgtgtatggagagagaaatatgcttgcgaaagcaagggtaataaagttggacacacattcatttttataaatcaatagaggcttttcccttgtattttataaaatcattcccttaccctgttgacagcattctctgtctgtgtaatttgaggccatctgataatttcctttctccagcgttttattatgaaaaatttcaagcagatagcaacattgaaagaattttcctggggacacccaccacctggattttttatcagtgaaaattttactgtatgtgctttgtcaaatatctgtctgtatgatcagtttgttgttgttgtcttttgagacggagtctctgttgcccaggctggagtgcagtggcgtgatcttggctcactgcaatctccacctttcaggttcaagagattctcctgcatcagactcccgagtagctgggattacaggcatgtgccaccacgcctggctaatttttgtatttttaatagagacggagtttcaccatgttgaccaggctggtctcgaactcctgacctcaagtgatccacccacctcagcctcccaaagtgctgggattataggcatgagccactgtgcccagcctagtttttttttttgtttgtttttttgtttttttttgtctatccatagagccagttgctaagctgtctgttggatcactccatgggttgattcacttactaggatttaggtaatcaaagcaggttagctagtcccaccttgtgagagcagaactagaagctgagctgtcagcctgagaatggtggcttggttttgctgtcttgtccttcctgtcattgtatttaaatcttctcaatgtttaagttttctctataacatttaagctgttgctaaactacaggaatgaaacataggtatatagaccaagcagaagcatagtttccctttttctgctgagtcctgactatttaggatgacaatgatatttgtttcctttaaattaacatgctttgaattaaattctgaatctgattccagggggcgatttgcactaccacctttcacaacacggtgtgttctctgagaaggagatgcggttttatgccactgaaatcattctgggtctggaacacatgcacaatcggtttgttgtctacagagatttgaaggtgaggacgattgacagactcattctgcatagtaggtattgtgtgaatggtcctctagaagtccccttctatttcatagagtcctgtcattttcctcatagccctcatctcagccctgatgaagtcattagctatatgacattttatctcctctagaccagactctgcggggacggagcgcatgtctgtccctgtcattattataaccctggtgcctactacagtgcctgctgcagcacgtatactaagccaaatatttagttgattagttaatgaaaagcaatttaggccaggtgcggtggctcatgcctgtaatcccagcactttgggaggccaaggagggcggatcacaaggtcaggagatcaaggccatcctggctaacacagtgaaaccccgtctctactaaaaatacaaaaaattagccgggcgtggtggcaggtgcctgtagtcccagctactcaggaggctgaggaaggagaacggagtgaacctgggaggcagagcttgcagtgagctgagattgcaccactgcactccagcctggacaacagagcaagactctgtctcaaaaaaaaaaaaaaaaaaaaagcagtttaggagcccttttggtgtcacccatttcatagttaattataattcagctaatgttcactaagcaactgatttggtcgtggctctgtaaagggctggaaatgtacaatgatggataagcaaagaacatatattttatggggcttagaagctggtgagctaagacatagaatggccgagtcataactcctccaaggcaaggtctatcagtgaatagtggatgccaaccagcctgcggaatttctctcaaaggccaccctcacagctttacattgttttgagattgccttaaaaatcactgatagagttttagatccttgcactgtgtaacctccaactgctgtgcccgagtttctgttcttgtcctctgtgagagctcactcaccttgaaagcaatgatataggagtattctgagtttttccattccagaacgcggtgcttggtcctgggttttacatgtgggaaggaggtagaagctggctcagggtgtccatggtgacactcacctagttgtatggccaacagcctgcaggcaggcatggagaaaaagggaccttgatgaattaatgattgcgcaaacatagaaatgcgtaaattgtaataagaaaaatgatgggactgacaatttgccaataggcgagaagattccaggagaatgtgtttgcctctcatttcagatgccttcttgaatgaacccacagtggccaactgaaatgtacagattatgttccttcctctagggagctgagatgctgtgattggcttttgaagattactttctaagatattataaaaattgtattttatttccaagaatttttttttttttttacaaaatactttgtgaattttaaacctttctgtaaggttacagaattattattattctcttagttttcctataagcataaagaagaaaaatgtatttttattgaattagaaataactagacaatagttggcccttgacattttatttccttatgcgagctttgcaaaagaacaaaacacatgctgacggcccatgaagcgctattgtaatacattctaatttaaatcagtaactggtttctaatcatctttatgctttatttttattttctaagctatttggaaggcagtggtattatttaatttctattcaaacttaattctagtcactcatgattattcatgcttcagttttctaatagcatgccatttatttttatttcaagcaaaacaatagttgatcgccagcagaaaaatattaagatgactataattcaatgtatatccgagagactaggtttgtttttcatgattatgatgactaaatctaatcttcatggatacatttcatcagagttgtggtcaaaattatatttggtcatttggtagggccctatgttaatgatgtactaataagcagaaatgacacttattgggattagtgtggcactatggaatattttgattgcttaggtcagtgttgatacattcttagaaacttcctgtctgtcctgtgcttcatggctttactcttagaaatccttgtggttctcagaagcccagaagctggtggactcacctcctgcccttgagaggcatgctgttgtggctgcgcaacagtccttggtacagtgaaaaggaaatgcttttaatgctgatgaactgttcccaacattcctgtgttacctgccccatgtttcattttctaatgagtagaatccttcgcctctgtcattaccactttgctgctgaagttaacatgaaagatattattctcagtatcatgccccactttgatgtgatgggctaaagctataatttgtgtttaggaacaaactatgataaaatagtgagatatcaggtgtctgcactcaaagttctcaaagcctgcatggcatttggggcactcttattaaagattattctctttctgtttagccagcaaatattctcttggatgaacatggacacgcaagaatatcagatcttggtcttgcctgcgatttttccaaaaagaagcctcatgcgagtgtgtaagtagtgcgtcaacttcagttcaccaccatttctctcctgccctttcaaaggcgtggccatttgtcaccccatttctcttaccagtggtgattttcaatatgtcaggaagatccaacatcacaggtcgtgggaaaggagataagaacaggatgccttcctcactgtctgcggagagcaggaattaacccacagtggagttgaacctgctcagggaccagggtggcctctcagaaacagtcaggacctcagcaaaaaatcagaatccatgctacctgtgtgaccctaaaagtcagtcagttacttagtctgttagtaatggtagtaataaacccctcaaagttgtcctaaggataagtgaaagagactgtgcctagaaaggcaccggggcagctgcgtggatgtggtcaagggaggtcctcggggccaagtttctgtcttcatctacttttccttctttttcaaaaaggcttttcttcttttttttttccctgaagagaaattaggaatatttctttctttcttttttaattaaagaaacaaatcatctgcttgcagtttaggctttcactgcaggccatattgttagacttgggtcttgcaccaggtcctctacgtgatcacccagagggaactcttgaggccacagctctcagccagcacctgacacctcggggacaccagactgcttctgggtgtggccctgcttgatcagtgcaagttggccctgacctgaggacttctctctgtactcggggttgttaaaaagacagcaggactagggcagttcccccggggctctgcagaaacaccatggaacgtgcactggttttcatttctgtttctttggtaggtgatgatctgggtggaaagtatgaacacatgtacagtttgtggaaaagcagacaacttttgctttattttgtctttttagatgtctcctccttagcactgaatcttttaaaattacattttattgacatcttaagctaacattcatctctgtgttgactggtcttgaaaaaaaactcccagtggtctcatttcatgcatctgtgcagaaaataaaccacagatccttctctttgtgtaactagaagtaaagtggttctgaactgcaatactttatgaaggactgcattaaatcaaaattgccttttaaagctctgatcaaatgttaatagtgaatagcaccgtttctgtaaacatatttctctttttctacagaatctgggatatggtgataaaagcattagcattttgctagcactttacaattattaggccagaacctgtggtcgtataagcgtctctcagggagttcatcagattcttttaagagagtcatttgaatttttaatgccacagttatttggtatgctaattttttcagtttagtatagtcataactaaatatgaatccaagagttcataagaaataatcttccagaggaattaactttcagatatggggttatttatttcctagcaggacctagtccactttttgctataattcacatgtcagctctgaacggtgggctgttcttttgcctgctctggatagtacaatatttgaacagcatctgtaaagaggtaggactgagaaggttggtttccatgtttaaataatgatcaggaggctactactttaaaaaggtaaacatacaacaaaattttatattttttatttttttgagacagggtcttgctctgtctccaaggctggagtacagtggtgtgatcacggctcactgcagcctccccctcccgggcccaagtgatcctcccacctcagcttcccaggtagctgggaccacagtcatgtgccccaacattcagctaatgtaaaaagaaatattttttaaagacggggtctcccaatgttacccaatctggtctctaactcccggactcaagcaaccctcccactttggcctcccaaagtgctgggattacaggtgtgagtcactgtgtcctgtcaaaatcctgtatttttaaataaaggaggcattttgtggctaggaataaaggctctggagccaacagatctgggtttgggttcttcttcctagttgtgtcagcctcattgtcccttctgtgaggaggagaggacaatgatatttatctcctgtgatagttgtgaggattaagttaactaaataattcagcaagtctttatttaacatttgctgtgtgccagctgctggcgatgccacggtaagacagagctgacctcagacctcctcgaacgagcagccctgagaactgtgtcccctaagtgaccagcatatggagtagtggcggtaccagcagcattcactgtgtcactcactgaatatccagctgttccaggcttgcatatgtcatcttcacggaaagcccatgtatttataggtgtcactatccaatttttgtggtatggaaattgaggttcagagaaagtaagtaacttgaaccaggtcacatggctggtatgccatggggctagaattataatccagttctgtctgattccaaagcctgtactctttacgctgtgtggatgaactccctgaggctttggcatgatctatttagtacaagacggaagatttttagccacaatttcaccctgaacttggtttctcagatcttttcaaagctgtagatgtgattcttagatttcttccagcggctggcccatctccaaagtagtattgtagttgaggtttttgatttgagcttagacttagtccatttaacgaaagaatcgcaaattattgtaaactagaagttaactgtgaagtagccatgaaaaaatcgcaggaaaacttttggagctgagcagattgtcagtgactaatttgagtactagcttattttatctaagaacacaaagctgtgtctcatgtcacagtgtcttaaaacgtccaagtgttcgttcagtattaatagtagtacagatctttagcagaatgcgtcaggaagcattagcagctgccttaggcagaatcagaaaacctcagcagcaggcagtccaaggttgagttttccttgtatgtggtaaaagcatggggggctggtctgcattcatttatcttatttatcctgtagatatctattgtagatatctttccattccagaactgtgacttgatcctgataagtacaggttacaaagtcacggaaaaggactttccaggcaaccctgaaattaaaccttcccggaaaatggcttggatgtccctcatagaaatctccaacgctctcacagcgtggcctgatgaccttaccctgtcaaactttaggttcgggctgattgagctttccagaatgctggatttgccctgatggaccaacgcccattttcactgttggataaaactctcaaatacacctcttagacagagagtaccagacccatgatgacccaggcttattagtgatccaggatcatttattctgagtagattctcactgttgctgagcataagcaagttaaaaattcttttttttttttttttttttttgagatggagtttcactcttgtcgcccaggctggagtgcaatggcaccatctcagctcaccataacctctgcctctgcctctgcctcccaagttcaagtgattctcctgcctcagcctcccgagtaactgggattacaggcatgcgccaccacgcctggctaattttgtatttttagtagagacggggtttctccacgttggtcaggctggtctcaaactcctgacctcaggtgatctgcctgccttggcctcccaaactgctgggattacaggcatgagtcagtgcacacggcctaaaaattcttacactaagataagcacagagatgcaaatccccaacacgaatccagtggctgctgtatgtggccccatgacgtttgtgcagtgctcacagcaaccctgagaggtagagatgtcatctgattacccattttactgatgaagaaaattaatcgtggatgaaaaggttgtagggcatacaaccttttgccagagccctgtcaggctgcatcttggaaagttccccaccggctgcctcgcatgcttcctgctgcagccgggcaagctcagcccttcaaggaggggtggagagtgctagagtgggaagggctttcgaattgcagatggtgcagattatatataaaatggttgtcctcctaagtgatttttctcaacttcctgaaaatcatcttcacatttgcttagtgctgagtccttttgaccttctgcagcttttgaaacctgacacgtgatttctccatcttatgtacaactgggctcatgttcctccttctttcccatccccctggggtctgttggtgaccatgaccaagccgatgcccctgtgagctcaggtcctcagcacaattggtggcaccacacaggggtggacgtctccatgccttcaaggtccacagcgccgcagcgtggtcgcctgttcatcatccgttcactcctccctttccctgcctcccctgaccccatgcacctccacatgagagctcctgaaacggcaggagaacctttgctcttcatagctggagtagagaaggactaatgagatcccgaacttgcattttacatatttatttcatacgcttatttatgttaattcatacatgagtgaaggcagaaaagatcgttttcccattggatgttcagtgcatcacgtttgcggtgaagcacaactgtcccctctcctttgtttacagtcgctgccatctaatgaaggacacccggaccttggggcgctgttagtgttttctaaagtgggcatgctctgataactgtgtatactttcttctccctagtggcacccatgggtacatggctcccgaggtgctgcagaaggggacggcctatgacagcagtgccgactggttctccctgggctgcatgcttttcaaacttctgagagggtgagttgaaatgcatccttctagtgctgtcctcatggcagcaggagcttggatgaaaactgagaatatgtagaaatgactagacgctaatgttattttaaatcacacagtgatctttaagccatgtgctaatctggaagactctgtcttagaagagtgaaagctgcttcccaataagctgctagataaaagcttatggcttcgtatttttattctgtaccatgtaggaatcagaattcttttaaacctaaaattagactgcttcgaatttttttctttgataagccacattgtaggaataagtattgttttgaaatgtaggtaatttaaaaaggtagaatgattttttccctagaaattaattattcatcatcttgagggtttacagattttgagagttacaaaaaaaggatgaaaacccaaagtaaacctattttattttattttgttttgtttttagacaagttctctctctgttgcctggctgcagtgtagtcacacagacatcacacacacaggctcactgtagcctcgacctcctgggctcaagcaatccttccacctcaacctcagtctcctgagtagctgggactacaggcacacaccatcacacccggctaattttttttttttttttttttgagacgtctcgctctgtctcccaggctggagtgcagtggcacatctctgctcactgcaagctccgcctcccgggttcacgccattctcctgcctcagcctcctgcgtagctgggactacaggcgcctgccaccacgccaggctaattttttgtattttttcagtagagacggggtttcatgatgttagccaggatggtctcgatctcctgactgggtgatccgcctgccttggcctcccaaagtgctgggattacaggtatgagccaccgcgtccggcctacacccagctaattttttaatgtttttagaggtgaggtcttgccatgttgcccaggctggtctcgaactcctggcctcaagccatcctcccacctcagcctcccaaagtgctgggattaaacgcctaagccaccacacctagccggtaaacccattttaaaaagcttgcgtttgttggggaaaatgctgaaattaatttgtcttttaaagctagtagtatacttggcccttgttctgaactaccaaagatgatgaaatagagtagaaaagattatgagaggaaagtactctcaaaatatgttctcatattaaacacttaacaattatgttaatgttgccattaattctaagacttttagccaattttaatggaaaacttcagttaaatttttttattattcagactcataaatcattttacattaaaatttcctagttaagattttccttttaatattttcatatgaacacagtcccgatagtttgctaaatgttgcacctttccatcggagagcctaactgagcaccactgcatcttactacatttagcacattctggagagaggctgaattctacattcccccaaaactaggttctgagcaccctctgtttcgtcaggactctgataatccagttgctctctactttgcattcacttgtgatctaaaattgtattattgcttagaaagtcgggttctgttattccttaattgaattattgtatttgtggagcctggatggctttaattcatgtcatcagactagctgacctaattagagagtttatctaagcaaaccagagaaagccatttcccctatgagatgctgttctccccagtggagtcgcttctatgcatatggagtgcatgaagacacccaggagatctttattttggatctctgctggagatgtggttggagacagacagtccctacctacagaatttggagatgataaaaagaaaactgtgcaacagctgaactgttgaatgtaaaaatcagcagtaaaatctgacaatcccagaagccttgtatttagggctttgtgtacttctttgttttgttactctagctgttaaaatggccatgcatataggctggggaggatttgctgtaacactgcttcattttttaaaagactagagggttttgttcaataactctgtctgctccaacagtgtggtttgtggctaataaaatgaattcagtcttatttggctgtaattcagctttggcatactgaactggaagatattaattcctttgtgaagtccttgattggccttgatggaagcattatgttcagtggggctcctgccgaaaagagtcttgacagacaggaagacatcctgaggatggccgtgaggctgggagggatggatgagataagtggagagtggtgaaatagctagaaatgatggcctccgtgggaagactgaaagagctgagtgcagaacttaggggagcgcatggttggctccagctgctggaaggccgtcttgttgaagggatcatatgcatgctgtgtaactccagagggatgcattttgaggagaaaaaagatttcagtttaatacaagaatgtccagtcatttgagctacccagtgaaggagggttctgcctcatggatagcaggctccttgtcactgtctggtgaccatcgattgagcctgaaatggaaggaatctttccagtgcttgatagataggattagatgaatctcccccactaggatttattatctcatgccattccttctattgtttgttcagaagtcactcacagataggatatagcactggagccaaagagcaggaaacatttttgacttaagtgatttaaattaaatgtgataagcatttactgcgtacctgcaatgtacaagagactgcttgatgctgtgggggaaggaaaggagtaaggaaggaaaaaaggagagggagggaggaagggaggaaggagagggagggaggagggaaggaagaaaggaggaaggagagggaggaaggaaggaaggaagaagggagagaggaagagagggagggagaaagaaagggaaggaggaagggagggaaggaaggaggaaggaagaagagggaagaaagggagaaaagggaaggaaggaagggagagaaagaaggaaggaaggaaggaagccaaccagccagccaggaagggagccacacaaaatctttgagggataggcagtctaggagagtagctattgatatacacaccggatcaggagctggctgagctgtgctaactttgacagtagcgatgtgctgcgagcacagacatggcagaaccaattctaacctggaagtgtagggttgacatcatgtgggagatggtctgtcgggtaggctttgaagataggtaggatgacaatacaaagcctgggagcaggggaaataccagctttctatgtttcttaagagggaaggagtgctgagggagaagtctcagatggttgggtcagcactgggaggacctcggatgcagtgctgggaagtttgacctttatcctccaggccccgaggctgaaagcttttcagcggagcagtggcagggttgggtggcttttcagtaagatgattctggaagcagcctggagcaatggaggaaccgagacaggaggcaggcagaagaatgtgagcaaaaggcagtgagtttgcgcagcagccctggaacctgacaggagcaaatgacatggcggcattgcagagttagcttctgtaacgcttcagtgttttcgtggagtgtgttttgtttttgtttttttatagatggttggatatggaaggatagaagttaaacatgctgcaatttagattcaagatgattgggagaataacgatgtcattactaaaatcagcgtctgtaaaatttcagtggttcacatgaaactgaagtgtacggagggcctttcaggagcaaaaccctgtggcgaggcgggcaggaggtgggactgtgtgcaggagccctcactgcctcagctgtgaacaaggggataatgccacctgttctacttcctcacaaagttgcatgtgggagaacctcaaaaatatgcctgtcagcctcctgtgcatttttcctgtgttgtatagaagggagcccctggcagctgtcttttctcaggcacacggggcctaagaaatcaactgagtggaggaggagattgactaggcagggtctctgaggcacaggcttgggcacagtcccctctgcatcctgacactcctggggcgcctgtcctcaaccctgggggacactgggcaatggctggaggcattcttggtcatcataacttgggaagtggctgctactggcatcccctaagtagaggccaaggatgctgctcaacatcctatgaggcacaggacagctcccgcaacaccccaacaaagaatcctttagccctaaatgtcaacagtgccgagggtgaggaccactgccccagagcaaatgcccctccctcctcccacagctgtgcagtgaggtggaatcaatggccaccaaggaagggtctttctattttcttttcttttcttttcttttctttttttttttttttttgagacgaagtctcgctctgtcgcccaggctggagtgcagtggtgcaatctcggctcactgcaacctctgcctcacggattcacgccattctcctgcctcagccttccaagtagctgggactacaggcgcccgccaccacgcccagctaattttttgtatttttagtagagacggggcatcactgtgttagccaggatggtcccgatctcctgatcccgtgatctgcccgcctcggcctcccaaagtgctgggattacaggcgtgagcccccgcgcccggccgctctgttttctgttttaatcctccttgctgtgaccagcgtgcccccttgcttctgctgaaacacctttctgcacacttcattttgtctttatcccctacaagaatactgcaaggcacttggagaaggagtctggatgggagaaagatgtcaaggcttcagaaggtgttttgcatccctggactcacagtgattgactgagccgctcatatgtgctatctttgagtgctggtcactacttctatttcagatgactttgtcagatacttaagagcgtctgtgtaggaagatgcatccatgttgcaaatctgtggagctgccatcatgatcttcacctagatttaagatgtctgttaaggaaatcaattgatgtgacagtggcctcgatcttaagcttgtcaccgttgattgtctccccgtggagttgtcagacatgagggagagcctgggcagtggcctagggagaactgagtgctgctggcgctattgagtttgttccaggaggggaaaaaggaaagtttataaatattttggcaactactggcttaggtttgaaatgcacatttaatataacatgccatcttttgggtattttattttattttatttgagacggcgtctcgctctattgcccaggctggagtgcagtagtgtgatcttggctcactgcaagctctgcctcacaggttcacaccattctcctgcctcagcctcccgagtagctgggactacaggctcccgccaccactcccggctaatttttgtatttttagtagagacgggtttcaccttgttagccgggatggtcttgatctcctgaccttgtgatccacctgcctcggcctcccaaagtgtgggattacaggcgtgacccaccgcgcccggcctcttttgggtattttgaaattaacttttgatgtgagagtttttaatcacataattttttgaacccattgtttgcccatgaaaatgatgtagagctaacttgggcaggatgtgtgttttcccatcatttataatgtcctgaacaattttccaactcatttaggggaaacgtgcagctgttccattctatctgtagttcagaaagctgcacttgaccacaggacatgtgaattcttttcccacaacgctccctgatgcagccagcatgttgcatgggaagagcttggccgtgccttgtaagctgttgacaggcctgttactgtctcctatttaaagcggctgcatcagggagcagctgcgatcacacaggatctgtgcacaccacgtgcctcactcagaatggagattattactatcataggttttctttaacgtttttcaaaatagaaaccaagtctttggctttgttcacaaagaataatcaagaatatattggaaacagatgtgcatcaagatttcaacttgaaagaccaaactgtctgaacatggcagcatagacttgaatagctgaagagcattttctgataatttctcattgagccggacatggaatcgctatatttataaatggaatttgtagcaatggggcccatgtgctggaaatggttttggcaccactaactttaactccaagtcccctcgcaagcctccctgtggtctcatgaaagactttttaaatttagcacagagcgcttgtgtcagaacacagcaggctgcaagtacatcgggaccagatgcaggagtggggtcctctggctttgcacgcaggagccaggtccgagggatttgtcaaaacaccaggagatcttcacttaatccctttttatacattaaggaacatcgtcgggtggaaacagctaagtgtcaagcagggagactaaggttttcataagatttgataaactttcattccttttctctgcaacctcaaacatgttaatatttctgtgcattttgtataaaagaatgatacaagtatgtttttaaaaattataaataacagatattgtttgcttttatatctgctttttaaatgtggtaattgtacattttttccttggaaataaggcaaaaagaatatttccaatcaaaatctgttttaaaagttaacaaatgcttgctgggtgctaatttaccttgttttgatcttttttttttttcccaaattaatgcttttaagagatggcaattagtttgtgtttcactgcatgatatggaaggaaataaaggactagagtgccctctcttgtacaaaaagaaaattaaagtgtttcagacaataaatggcctgaaatgtaataatctcaaaagatagttcaatgtataacctaattaattcagtaggatgaccagctcagtagcagtaagtagcagtgcaagataagtggcattttaattcttttttagaatctctgatttatgtgttcaacattctaatccattttatggagttaatattaaaatattttgcataatatcctgcctgcctcagattatgtcatatatgccttataaataaatttataagatgactactttgtaggcacatcttgttataagaaaagtcaatcatatgtgtccctttaattttcaaaatgaaaaataaaccatggtaatttagtttgcatatttaatagtgtcttttaatgataagatttcctttgaaagccagcttctccaaagtttttaaaacatgagagtgagaataatctgttttacatagttcaccaagtagacattcatttcataaagtaagagttatctttattaatttcaccagtggttactgtattaggtacctaccgtgtactgccattgtcttggctacttgcatagatgtcactttagtttttcccttcactgcttctgtgaagtatgcggcttgatccccgctttacagatgaagaattgatactgaaggtttctatgtggctgacagtcactaaaccaacaagtcacaacttgaacccagcttttctgactctggagtcgggttctgcacagggaaaacaggaagcgctcagagctgtggagaatctgctggtgcacggttagtttctgttttcatcaaagggatgtattacttaaaatgactggtttctaggggtgaatcatttcatctccttcatgttttggttcaactgctgttccttgggctgtttgagggaccaatatccatttttctgaaaaatgtacatgaaagttattgtttagctcgaactctcatatgacaaatgttatataaatgacttttattctcatgattacctgttggctagttatatattcttttctaatgatgtttccattggaacagcgtattttagggccacaagttcactgaagtgagattcaggcagttcaagtaagatacaagtcttgctatttcaggacctagcatttattcaccagttcttccatggaaatgataaatgtttacggcttttgcatttctccagttttgaatgaatagtgataggacatcatactttacccaaatattagtcagtgatatgttctatatcacctgatgccatattttgatagaacaattctttatttctacagtcacagccctttcagacaacataaaaccaaagacaagcatgaaattgaccgaatgacactcaccgtggtaaggggattcaaaactgtattcttgtctgtatggtaattgtcatgcttcattccgtcaataataaaaaaatgctattacataaaatgttataggaaatataaaattatgtatagacataataaaaatttgctttcttgaaacaaataaatgcagatacaatttctaaaagaatttctaggggaaacattaatggaaatagatgccaaggcaaaaatcaggatttactaacgaacagtatgaggaagctaaagaaaatcgagaacagaagtaaagaaatcaaagaaaaggagaaattactgagatgccaacgaatgagaatgccttccggttcttctgatctgcccccagcctcattgattttgcaactgattagttatcttttcatgtttctatagagtaaatattaattcataatgaggctgcaatttttaatactatgcttatcccagtaatagtctttaagtctggttgagtgttaggatgctgtttcatgaacggatttttgaaatcttactcgtcttttccccagaatgtggaacttccagacaccttctctcctgaactgaagtcccttttggagggcttgcttcagcgagacgttagcaagcggctgggctgtcacggaggcgggtaggccattgttcctgcctttcggtatctttaccagaagagcaaaatagtgattttaaatactgtctatcaaaagtcatccctagtcattaaaatcttccattttgacttgaaaggggaaaaaaataaatcacatgggaaatatacaaatattgtcctatgtgttttataattaagaagttgaagaagtcactcacttttttactttatttatttttgagatggagtcttgccctgtcacccaggctgtagtgcagtggcgtgatctcagctcactgcaacctccacctcctagggttcaagcaattctcctgcctcagcctcctgagtagctaggaccactggggtgtgctaccacgcctggctaatttttgcatttttagtagagacggggttttcctatgttggccaggctggtctcaaactcctgacctcaggtgatccacctgccttggcctctcaaagtgctgggattataggcgtgagccactgcggccagcccactttttaacttttaaagattgaccttgtagatgacagaagtgaattctgatattttgtagtccatttgttttttagtgatggttgtatttgtgattgtggcagtttaacattctgatcagtttctcacatatttctctcatgcataactgagtaactgcgatctaacacatgctcactattctcctgccccaaaacactctgaacagtaatatctggaaagcttatagagagggacttcagacagacctttttcctgtatctcttctcccccaggcttgcttggcataagaaataacttttaactgtatattacctatatgtatatcatacatatgtgtatgtatttttagtgtgcatattatacatataagcattttatgtagatagctaaataatgtacatatatatgagtatgtccttatcaatttgcaaaattacctattcctgctataatagatgaagatttagctcactcattactgtctctgtagccttcccttcctccacctctcaaaagttgaaacgctattttgagctcctcttttgctttcctctgtagctttaaattccatgcttaacccggtcttgcctttttccaactataaacagtatctgagttgaggattttgacattcctatctttcattgacttctgtctcatgttctttcatgttaatttttatttttacattatcaagatgatactgctttctattctgtgatcataatcaatcataatcaatctttgtgctttgcatataggttaatttcaaaagttgcaaatgaagaaggggtatttacactgttaaggaatcaaaaatgttgttcattacaaggcttttacttagcctggtaataaaccttaagttagtcatatatatacatatatagtatgatctctctctctctctctcaaaaaagaatatgatagttgtggactttgtttttccatgatgtttctttcgggaaggactcagcctgcagctgcaatgaaaaagaggtgctctatttctgctgattggcatcatctcacccaacacttccctttccagtcttctggactgaatctgccattcacttgattccctgcctcctgctatatttaggctagatatagaattctaaggaagtaataattttcccccagagctttgaaactcttactttattgtgtacaagcaagcagtcaatgcaggtcatggagctaggttaccactcgcgatggcagacaggtagcatcccttgtgctcggagactcgtgttcttcagcttggagaccaccctttatttatttgacatttatcctcctctgtttctcatagaactcttattagctggatgctgggattcctttctagatttgggcctctgcacttctgatcttgtatattacctgcatctttgctttaattctttgttttacttgccgatagcacaaattttcaaccctttcgttgatttctttctaaaaatctttagcaggtttaatttcttaaaagtagaacctttcaggggttttaccccatgttaaacaccttgctgcaggtgttctggagttgggtgtcagggaagaagtacggcgggtatgggtgtgcatttgtgtgcaagtgtgcagctcaatgcccaggcctgtgtctcatcccccagccacacacactgtggtgagctggagctcagcatgctggctccgtccccagggcagtagctctgccctgctttgctgtcagtcactgcccctgtgtcagcaccccctcttgtctgctgatggccctctctctctcgtggtggatttatttttttaatatttatttttactttttattttttatttttttgagattgagtctcgctctgttacccaggttggagtgcagtggcacaatcttggctcactgcaaactctgtctcccaggttcaagtgattctcctgcctcagcttcccgagtagctggggctacaggtgtgcaccaccacgcccagctaatgtttagtagagatggggtttccccatgttggccaggctggtctcgaactcctgatctcaagtgatctatgtgccttggcctcccaaagtgctgggattacaggcgtgagccaccatgtctggcctatttttgttttttaaaagtgatagtatctcactctgtcacccagactggagtgcaatggcatgatcatagctcactccagctccaaactcccggcccaagtaattctttggccccagcctcccaagtagctgagaccacaggcccacattaccatgcctggctaactttttttttttttatagagaaggggtcttgctatgctgcccagacaggtcttgaactcctggcctcaagtgatcttctcctcttagcccccaaagacctaggattacaggcatgggctaccatgcctgtctcctgtggtgggtttatatctctgtgttcctttcctgccattttagtggttattgagactgtgtgaagttgcatgctttcatgcaatcactggcttgaacaagaaaccttttttctggggcatttctaattgcttggatatatgcaagtaaacttcttatttagcttatcacatttaatgtgttgacaatgatgggtacaaaatggaacccaataagaaaatcaccgaagtgtttccagtaaaaatgcacaaggatatgctctgacttggatcccattctttcattcaatgtctgtttactgggcacacactgatgctaccccgtgaagtggctgaggcagtgcacatggtaggcatggcccctgccttcctgaagctcatgctatgggaaagccatggtgtagaattatcaagtaagacaggtccagatagtgagaagtacctgtgtggaggacgaggtgccaccttatgaagaggcctggggaggaacactccagctggaggagtcagcgagggaggacttccaggtagaatcagtgctcccgtgatccagcaaagccaggtctcctgggcactgggtttggttataaatgcgaagcaagactggagagttttgagcagaggagtggtgagttcattgaagaagatgacttgggcgctgtatgaagtgggatggggctgcaggtgggcaggactagaggtcagaggaggagacattagagtagttcaggcaagaggtaccaggaccctggtgcctcggtgtttctggcagtacgtctatcatcccttccctgcccacaaatgccagtagcatcctgagcaggaatcaccaccccggccaggcgcagtggctcacgcctgtaatcccagtactttgggaggccgaggtgggtggatcacaaggtcaggagtttgcgaccagcctgaccaacatggtgaaaccccatctctactaaatatacaataataataataataattagccgggtgtggtggcacgcacctgtattcccagctactcagaggctgaggcaggagaatcgcttgaacccaggaggcggaggttgcagtgagccgagatggcgccactgcactccagcctgggtgacaaaaaaaaagaaacaccacccctaagcgagagtctcgtgaggatgggaggtggtaggaagtagtcaggtctgggtctggccaaggggtggctgtgaagcctgagggaagacaggcatccaggaccatcctggctgggcctgtgcaggagcagtgcggagagggctgtgttagccctgcctgcatcctctgagtgggctggggagtaggagtgtcctggaacacagggcacaggttggtgcttgggctacagatttaggagtcctataagggcactcaagctctgggctgggcgagatgccccagggactgactacaggaggaccccaagaagcagccctgagctgtgtgacaggatgtggagagatagaaagtcagtggcatgtgctgggagtgctcctcccccatgcgggcttttccttggagtgtgcaattttttttttttttttcctggcaacagattctcactctgtcactcaggctggagtgcaatggcacaatctcggctcactgcaacctccacctcccgggttcaagcaaatctcctgcctcagcctcccgagtagctgagactacaggcgcctgccaccatgcccagctaattttttgtattttagtcgagacagggtttcattgtgttgcccagactggtctcgatctcctgaactcagacaatccacccaccttggcctcccaaagtgctaagattacaggtatgagccaccatgcctgaccaacttttgctctgggtactccaagttttaatcatgaccttcaagaaaacttgtttcttcaatttattttttatttttatttttattttttttttgagatggagtctcgctctgtcgcccaggctggagtccagtggcgcaatctcggttcactgcaagctccacctcccgggttcacgccgttctcctgcttcagccttccgagtagctgggattacaggcgcccgtcaccatgcccggctaattttttgtattttcggtagagaaggggtttcaccgtgttagccaggatggtcttgatctcctgacctcgtgatctgcccgcctcagcctcccaaagtgctgggattacaggcgtgagccaccacacccggctaatttttttgtatttttagtagagatgggatttcaccgtgttagccaggatgggtttcttcaatttataaagggttttggtatacattatattattagatctcttgtttgcttctgagtaaatgtggtgcttcacattcctgtcattttcctattacattatctattgcgatgtgtaaatatttgctgtaaatttctttaatgtgtagatatccaatttaattcttattttcagttatgttctcctgactatagaattattgtgtgtgtgtgtgtgtgcgtgtgtatatatatatctgtgaaaatttctaggttatcttaaactgtaataactatcccaaataaatgatcatatgggataatattcccaggcgctgcatgcagtattctaaacatcgtagcattcctcctgttgttttgaaggaagcatatttgtttgctttcttaaaggaaaaagtggaaatacttgctcccctgtattgttaacaggagacagttttgcacaatatttattacgtttccaaatgcatactcagcactgttatgactctttctcctccagctcacaggaagtaaaagagcacagctttttcaaaggtgttgactggcagcatgtctacttacaaaaggtactcactccctcttgactctacttacggtactgccgccccgcccttacccgctcatctctgtctcagtttctgtctctgtctctctatgcactgctggcttcctggctgtgtctccccagcatccccaccacccacctcccccagcatcctgtgtccacactctcttgttacccgagagttaccatgtagccagttccctttggggcatcctctcactcttcatttctctaatagaaacattttgaaaatatctcctatatcaactaataaaaggtaaaatggagctattatctagttaattcaaatgcacatataattgagccttttttagtttttgctcttcttcttgaattcttatctcaatgtgactgtatttttacatagatctctataaaatgtacgtgaaacttctgccataaacgtatgtatattttctagcccaatactacataatttaagaattagcatgattttatatcagcatgatttcctttccttattttaagcttcattatatttgcgttgatacaggaaacaccccaaattcaatttttagaaaaatgttgattatcagctttaaacttgctttgcgtgaactcaagctgcagagaaatgacgattttctgtagtaaagaaagactgatctgtcagtcctactgaattagagtccgacctctgggtcagttaacacataccttggagcgtttgcagatgtgccctgctccctccaggccccattgtctgttgtggctccggcaacccaaaggtggtgttgcgtcctctcagagaatgtgctttcttaagctgagctggacggatatgcagtcctgagattttgttatatttgaaaattattgaaggctttggacatgaatcctatttttctttaatttgtctaaaatatagggccttcctttggggctattgagtgcagtggcttttctacaaaatatgaaatgtgatttgttacaagtttgaatgacatgctgcgcagtggagcatgcggatatctcgcactgtgctgtctttgtagaatgttaggttgggacagggccatacgatcatctgaaaactgtaccatgcttgtttggatcttccagtacccaccacccttgattcctccccggggagaagtcaatgctgctgatgcctttgatattggctcatttgatgaagaggataccaaagggattaaggtacacatgtgatcatttatttctttatttttatttttggatgggatgatttctgttggaaatcaaacttagtggttgttttaatattgggctgtttatagtatttaacttacaaatgagtatcaacatatttgaagaatgtgtaagttaaggatctaaattaaaggctttgaaagctttcttcagactaataattttatttttgaggaactacatggtaaaatattattgatttggaatatttgtgattgaaataaaacttgaattatacctgaagcaggaaaaacagctgtgtgatatcaaacatacttccctagtgcaaaagagccagctgtctcaattcttctaagtttttagatctccccgtgttaggatgaaagagcaaacagcatgaatcattttgcatttgtcaatcaaaggtgaaataatcactgttttttttaatacaatcctctgcatttttcgaacttttgttcatatcgttattcccccaagtagagacaagacataattagagatggtgagtcatgagagaagatcattctgtttaagatgctgggtcaaagtgtatcactacatcaagctctcacctacccccatgctggcagcttgccccaggctctaccccctgcccccgggccttccctgtttcttctcagctgcccccatttacacccttctgacacaaacccgcgttgccttccccaccaagtagcttccttctccagaaggctgcagcactattaaaacacacacctgtgaggtgtaaataaaagagtgacaagtaaaatgcaagggcctagcaggagctataactggagacacgtaggactgggaccagctagactgtgggacagaaaagccagtaaatggctggaggaagatgggaggattgtggggaaggagagcagcatgtacacgccaagtgcacctggggaacccagtggcagctggtcagagctaggggccccaggagatgaggggctgggccatgatggtgattggggtgttcatgggaccagcttttctggtgttggaggttaggtgaaggcaaagtgcagagggcccaggtcacagggctgtgaggattgctgaccaactgagggacacccttctgtggtctggagcagtggctggggtcagcattgagaccgatgcctagacctgtgcacaaccaggcatcgtctgtagccggaaccattgatacctgtcaggtatatgagtatacagcagtgctttggggaacaatccatttacaaaggtatttaaaaaatttactgctgtcacaatagaattttttcacctgctgtataccactatctgtccgtcagagtactaaaaataaaacactattacgtgggtgcccacaaacattttttaatgttaaaaagagatgatcatacttaaaaatgttgtaaaccaagatctaggctttggagtcagacagactgggctgggatctgccactgagctgagtgaatgtgggccattctgcaacctctcgagtcttggctttctcacctgtaaagtgggtggtttcattgccaagctttctctgaggataaatgaggtggcctgctgaaggctacaggcatatagtcaatgcttgacaaactagtagcttctattattatgttttggttcttcctgagcaagagctgagaaagagcacacttagaacaagaagtcctgtctggtagggattcagctgtaaacaagaagcccaggtcctgctcccgtgagagctgagtccagcagggagggcaggggactgcattttaagaaactgtcttttaaaaacagcctaaataatacattttctttaaaagggtgggggaaaactcacctcatgtaaacataagttcttttttaaaaaaattcattttcagcaaggtgggctcagtcataaagatcaagtctttctgaaattataggcggtagaacagtgtctattaaacagagttggccatttcagaataactgcctgggcaaggagcatgctttgactctttgccagaccgttcagagcctgtccctgtgtgcctgatctcaggtgctcatcggaccttgaggttttcaacaccccatcactcacacacacactcacacacgcacctccagtcccattcagagcaactgaggggctcagctatgggcttagatagaatgtctgaagaaaacagaaagaggaaaaactctacaggtcaaagcgacctcagaatcaacagattattataatagatcaatgagactggatggagtaggccccatattggcatgtgggatgcagcttcttctggtgttctgttgatttgctaagggagtgtgtgcaagtgccttagcctccttggtctttcttgcccttctcagtattttgcctgttatgatacctacccctgcttatctttcaaggagtaagcaaatcaagtttctaaggaggtctgtgcttctaagacaagcatgtatttaccagcaggcttgctagtatttctgctataaaaatgtagttcacatgcagaaaaccattttctttgctcatattcaaaatgcagccttacctagagggcagaaagaagaattttgaataatcgtttagaagaaaaatgctaccattaagtataatttttgttccagcagctcttaaaggctccattgcctgaactccccatatgtcttgagatttcttatacatatgattatgatgtcaaactgtaaatagttggaaggttcatggaattaataggaagctcagcttcatttaccttttgtttttctaacttttcagattaattgagggtaggttcaaaagccctcttggcttctcccttataactgtttctgaaactatagaaacagttttcctacctatataaacaaaatatccttaccataattgaaattttactttgttgtcagaatctcagtacttcaagtaaaattctgtatatgtgagttttcgttggcaaaacatgtcatgaagatagtatacaagattgggttgattgtagctgatccaggactgaaagtgaagtgctcatcagttctgtttgtggatgatgattgcttgagttgtcattagcagagatttatgataactaagaacctgcctcgaaatgattactgctgccatctagtcatcttcctatatagagttatgatagagtcaccatggatgtggcgccgcggactcttacctttgtaagtatgttaaatcataaatatcttgatttcttaaaataatcagctacttgattgcgaccaagaactctacaagaacttccctttggtcatctctgaacgctggcagcaagaagtaacggaaacagtttatgaagcagtaaatgcagacacagataaaatcgaggccaggaagagagctaaaaataagcaacttggccacgaagaaggtaaaatagctcacgtgtctcaaaacatttctaatgcagtaaattttcaaaatttcttgtaaagctgaaaaagtatttgggtcgtaaggtattttgcagtcgagaagaaagcaatgccataaatcgctttagtttgctctggcttggaagagctcagtctaatatttcaaagtcttcaggcagcacacaaataagtctatggagacaggtggccgggtttctttagtatgcccttttatcttggagtgcttggggactggtttggacgttttttccttccagattgagtatgacagtgtctggagtggggttggtgtcattggtgtgtgccctgtgcggtcatctgggcacctgactcagtttagtcctctgttgtcatcaccttgagactcttagtcatttttgaacaaggggcctgccttttcattttgcactggggcccgagaagtatgtagctggtcctggcgaggaacttagcacgacatgtcacttgtcaagagaggtaaatgtctcccattcaagtactaaccaggcccaaccctgcttagcttccaagatcagatgacatcgggtgtgttaagggttgtatggccatagacaaaagagttaaatatataaagacatttatattacaaacagcattttaaaaattgccaaatcaggccaggtgcagtggctcatgtctgtaatcccagcacctcgggaggccgaggcaggaggatcacttgagtccagaagtccaagaccagcctgggcaacatggtgaaaccccatctctacaaaaaataagaattagccaggtgtggtggcatgcacctgtagtcccagggactggggggccgagacaggaagatcacttgagaccaggaggtcgtctgcagtgagctgagattgtgccactgcactctagcctgggtgacacagcgagaagctgtctcaaaaaaaaaaaaattgccaaactgtatttttatgtaaataattcaatgccctactaaacataacatcaagtaggaaacataagttttaaataaatcagtcattctcatttcactgaatatggttactcttgatttttctaagatttcatgaattgtggataattaaatttattgtagtcgatgattatgttaagatgtaatttcatcttccctctgagcaaagacccttgcaaggttaaccttatgtaacaagaatggccagaaactctttcactctattaataggttactttggtagcagcatcttggtataggattccttggtcttatctgatgattttcctgtggcatttaaagtgtcttcaattctggatgacttactctttatataaacgttgccagaatacaccaagggaatcctgcattcttttaactctgtttacctcaattctgcagggacacatagcctttatttgtaagctcttctttttttttctagatggagtctcacactgtcacccaggttggagtgcagtggcgcgatctcggctcactgcaacctccgcctcccaggttcaagtgattctcctgcctcagcctcccaagcagctgggattacaggcgcccaccaccacgcctggctatttttttttgtatttttagtagagatgggatttcactatgttggccaggctggtcttgaactcctgacctcatgatccgcctgccttggcctcccaaagtgctgggattacaggcgtgagccactgcgcccggccataagctcttctttagagaaccggtccattgtgatcacactggggtgtgtttgccacagcagattttacacaggaaattgaatcaatgtcgacttgctcaagggggggtcatggtgtcactagaatcctgattaattggatccacaactatatatagatcttcataagcatgttcaagtgtatccttctagttagagctgtaattagaaagtttagcaaatcaatgaatttatcttcctgtgttagtaagtaattcgtgcataagtaggtcttggctgacaatctcagaggtcacctttatagaaaaatatagtctaggcttagattcctgaaaaaaaaaaattataataaagttggtcctccacatctcaggttctgcatctgtggattcgaccaaccatgatcaaaaatatctggagaaaaccaataagaataacaatacaacaataaaaaataatgcaaataaaagccatacagcaggggttcccaacccccagtggggaggccagttaggaaccgggctgcacagcaggagatcagtgctgggcgagtgagcatcaccacctgagctccgcctcctgtcagatcagcagtggcctgagattctcgtaggattgcaaaccctatcatgaactgcgcacgtgagggatctaggttacgtgctccttatgagaatcgaatgcttgatctgaagtagcacagtttgaacccaaaaccattcccccatccccgtctgtggaaaaattgtcttccactaaactggtccccggtgccaagaaggttcgggaccactgctacacagtgtaacaactatttatgtagcatttacactgtattaggtattataggtaaactagaggtgatttaaagtttgtaggaggatatatgtaggttctatgcaaacaccatgccattttatattgatgacttgaacatctactgatttcggtgtctgctggggtcctggaacctaccccttgtggctaccaagggatgactgtgctcgtattttaaacagatttcggaaatgcaagcacttctcagtgaaaaggacgactccatccttccccatcaccactgaccctccctggccctccctctcctttgttctttacctgcttgtctccagatgacttgacatgggttttacgtgtttacttatggtctgaaacactcactagattgtaagctctctgaagcaggggtttttgtctcttgttctctgctgaacccagaatatctggaacatgcccagcacctgggcattcacgtgccacttgttgaagaaatgagtgtgtgactgaatgactttaggacaatcaccaaagcctttaatacagactttaaaattaaccttttctttttttaaggacacagtccttcactgtaaaaatgtaatcaggactcaacaatgtctgtgaattatctctatacataaccatatatttgaggaataaacctaacattaagctgaggaaggaaccatttttgatccttatgttaccttaaattacttagacaagaaaattcccactattattatttttaagataaaagggagattaaagggggaatcccaaccccacgtaaaggcgaaggtactttggggatagcttgactttaaataccgtctattctccggttctcattacacataatgaaaagagtttggaaactaacttttgccctcccagagcaataaatgaacatcatggatttatcagcatattgagaagcaatcatttactgtgtgagcagagagagctgcagaaccctctgatctttagatccccagtacacatgcacttaaaactaaaatcgtgacttctgtaatgcgttctatttatagaaacctgctttttccaaaaagcatgtctgttcttttttcagagaataatgctgctaagacattttgtttcagagcctatttaactcctagtgattttgtattcctcagattacgctctggggaaggactgtattatgcacgggtacatgctgaaactgggaaacccatttctgactcagtggcagcgtcgctatttttacctctttccaaatagacttgaatggagaggagagggagagtcccgggtaagtctaaggcagcctcaccgagcatgtttcccagtacgtacaatggcatatggttatttcatgttgctgacatgttttatacactatcctccgaaactctgtgattctattttactgctctacatgagattgtaatgtgcaaactttaacttgtttttaaacttccaagtcaaggaacaacttggtaatacctgaaaatagaacatgctttttagtgaggtcagaagcaccacatcatcagatggatttgaagaaggctggagagcagttagacagatctaaaaagaaaagacaagctggactttgaagtcagacagaggtgttcagctccactgctgagtgtctctgggactttgaacacgtcacattgactctctcagcctccgttttctcatctgtgaaatgagggaaatagaaatcataacaactgcagtcagccctccatatccacagatccccatcctgggattcaaacaaccaaggagagaaaatatgcgggaaaaagaaatttaaaataacaacaaaacaataaaaactaatacagaaaaaaaacaacacagtctaacgactgtttacatagcatttacgttagaggtgatttagagtatacaggaggatgtgtgaaggttatatgcaaatacgataccattttatatcagcaacttgagcatctgtggattttgtataatttggacctgggcagattatacatttattatgctactcaggggttcctggaaccagtcccctgtggatactaagggatgactgtactgtaatttttgcatgtttatctgaggtcaagtgctgttaaaaaaaaaaaaaactccatgtgtttgggaacctttgagggtccaactctcattttataaagaggaaagcaggcttagaagaggaaagtctgccacccaaaaacacaactggacagttaggaggtggaagggtgactcagaccaggtcatcctgtgccctcagtctctccattgtacggcctctcctagttgggtcaaataaaatgtcccaggccatgacacttggcacagagatgaggtcaccaaaagatgcttccttgtgtctccaccttgttgagaatttgtaggtggatcatacaacagacagcaagatgtagctgccctctaagatcctttcgagagctaatgtttgtgaacaagataaaaagaaatttctgatccgcactacctttcagcaaatcaggcagcatttattaagtgcctactgggtgaagagcccagggcttgtcaacaaggaaggagccaaccctggtggaaggcatcttttcttttcttggtggggtggggggggggcctggtgagtcatcgtaagcaggacgatggtcccaaacactcaaaacattgtttatgtgttggatatgttggaataccacccatctgttctccagagatcagaagtgtggaaaacagggcacctaaatctcatgtatttgactttggactgtatttttagtttactgttagcaaagttttcattcaattatgaatgattacaattgcatatcactccatttctttgaaaagaaagaagatcttcccaaccatcactcctgccatcgaagttatttttgaaaaattagaatctaggatctaagttccaattaataagatccttttggggacctgaagtgtaactcagggctgggaagcatcagagtagctccccaaagctcactgtatttccaggtaatgagcggacctgggcagattatacatttattatgctacccactggcatgttaaaaggaaatcaccccacttttcaggctgtttgaaaacttaaaaaaacaaaacttttacctttgtttaacattggatgcaataaatgagcttggttttaaaaggttcaacatttagtgttctatttaagaagctacataatatgcatgagcagatttgtaagtctaagtaaggaaaaagaaaacctgagtgtttatcagagtgccatttctcattcaggattcctgaagtatttatttaaaacaaaaaccgtaagacgctaaggaactcatgacactatagcattcactttaaggaataatactatagactttttttttttttttttttttttttttgagacagagtcttgctctgtcgcccaggctggagtgcagtggcgcgatcttggctcactgcaacctccacctcctgcgttcaagcgattctcctgcctcagcctcccgagtagctgggactacaggagcccgctaccacgcccggctaatttttgtatttttagtagagacggggtttcaccatcttggccaggttggtctcgagctcttgacctcgtgatgcacccgcctcggcctcccaaagtgctgggattacaggcatgagccaccgcgcccagcctatagaccttttaatcttttaatgaaaccacctctatttatgacatcattgggatactatcaaaatattgttagcttacaagctgacatcagtaaacatttactgagttgctgccttaaaactgaaccacacacctttggctcacataaatcatatgtggctctgttgcttcctcacaatgttattgacagaatgtatatgagtgtgccatacagcaagtaggcttgcgattcatcatcattcaaaatcagttctgtgttgagggaacagctttgccgtttttccctagcaaaacattgctttctctgcagttttccttgaaacattataatttgaacttttgtttgtgttcctttatagccattttccccttacttctagaataccatcaaagaaagaaaaccgaatgtgttttctttttttacttgttctaacttggtagtttttggtattactacttaagaaatcacaaaataatttgaattttaaatttctgtttttatggttagcaaaatttactgacaatggaacagattctctctgtggaagaaactcaaattaaagacaaaaaatgcattttgttcagaataaaaggagggaaacaatttgtcttgcaatgtgaggtgagtttttattttttcttaggtgaatgttagaataattaaatattcagcaaagttgactgcctgtctataaaacattttcttatgccatgttttatcacttacaaacttagtaagaaagccccaaggtacaaggttttcagcaaattcatcgtgattttttaaaaaggcaaatattagaaaatggcaggaggatgcaggtgaaataatgtcattactctatctggaaaatctgctcagtatttaatagggctggaattttatttgttctataactttgaagatttttcggcatgttcgatgttaaggtttatatatttagataaatataagacggcaaactgaaatgccatcttctctaaacgaaaatgccatcttttcctcaaagttacattgtaacacaaatttcattcctggacactttgtgactggttcactagtgtgtgtgttttaagagagcatatttagagaaataaacacgtattagatgcaaaaaaatcatttttactaacatcagtactacattacatacatgaatatatatttaaaacattttttaatttgtcaaaactccttcccctatattattatagatttcagttgttttagaaatcaaaagtaatctctaaacaaattaaaggcagtgattctcagagtgggattgtactggaatcatctgaagggttttaatgtggcctttccctgctcttttcaagagattctggagaaggtggcagcgtgacccatcagctagtaatgccactgggggtggacacgtagggtgtgcttccttcaggggttccagggacgctggtaatcaataggggcagcctccgctgttggcaaaatgggtgagcctgtcacaacggctgcctttgtattccccctcagagtgatccagagtttgtgcagtggaagaaagagttgaacgaaaccttcaaggaggcccagcggctattgcgtcgtgccccgaagttcctcaacaaacctcggtcaggtactgtggagctcccaaagccatccctctgtcacagaaacagcaacggcctctagcacccagaaacagggagggtcctcgaggaggacacaccagggtctcagccttttggggtgaacgaggatgaggcatctgatctattcgctaccgggactcctccaggctcccgagaggagtcgggacccttcggcttggggtcagctcagctccctgccttgtcacatttgtctgcattagaaactactgaagaaataaaagttctttttctttgctacacactttggtacctatgaacctagaacttgaagtgactcctacttatcacgtaaatttttatgtctgatatcaaacacatcttagactccccagaatggaatttaaagatgttcagtgttgggtaacagattgccctaagcattgccacatattctgtctagtcactgctgattttctatgtctttgctccatactgctgggggatgggagagccacagtgtgtttcttttgtgcacttcgcaactgacttcttgtcctggggttaaaagttgaagatattttctgatgatattaaaagttgaagatatttctgcacttgggccctcctctgggagccgcacccacatgactgccctgcctctgaccagtctgttccggggccccctcagccaggtgggaatgacggacacgtactatccaagtgtatgggattaactaatcattgaaggcattcatccgtccatcattggaaagatttacagtgattctgaaggacaggccgtggagttttaggtttcaggggcaagagcagttttcaaaagtctttgagtccagtgtgcacgagtcgacaagcagtacctggcatgcaggagcactcatgggtgagtccgtctcaggtctcgacaattagcagttgtgtgacagtcattctggttccttctgcctgaccctgggagacatatcagtaatggatgtacaaaagcaggtctgttttatgtcttagtataatttcagatgaattgtattgaaaaaatgctgaggaatgaatgtgtcaaaatgggttaactgtgtatattgactttcatgtcgtcatgcatctgtcatgaatgaatgatactttgcactgggctgtacgacagtgaggaccttagggcatgaagcctttttcctggtcccagcagcatctgccctgtgaagtttgttttctcccactgcctccaggccccactgatacccccaaatagatgctgggttatgagaaccagcgaaatcccccatgtcatcagtcttaaaaaaaaaattttacaaatccacgtatttgtcccattcttggagtagttttagtgtatgtctttacattaactactaacagtataaataacttgacatcgtaattgtctgcatcctgtccttgatatttttagcagttccaaatctttgtttttgtatttgtttgctgtgttcatgggcaaagtaagtactttttaatgcagttattttgagagtttggaagataattaccaaaagggtccattatttcataagagttactttgcaaaaaaaaaaatgtgggtttttttttttgtctatctcaactactagttggggtttaaattaacatacattttctactatctgttatttccagtgtgggaggagggatgtactacttacatgcattctccttatttaaaaaggaagaatagtattcaaattctgttgaaacacacacacacacacacacacacacacacacacactccagaagcagaaaagccattgttcttaaagagtgaatgtcttcccagccctggttaattatagctgtgactgatgccgttcccgtctgcatctcaagctcataggttctcagcatgtgcagttgaggatgcgctgggcctcatgcctgttctagatctccaggataaagggcctgctgttgactccaccagggtctgggcttagcgtctaatatctcgtacctagggcgtgagctgcacaaacgtgttcagaaagattattcaactttcccatacttgttctaaaattgagctgatccgcatctctttcaaaaactagaatttctgctctaagaatagaacataaggctccactcccttttagaaaagatatatgaattggaaaatgctctgaaagtccttttgcttcaaacaaaagtgtaaacttttacacttccccaactcacatttgatttgtaatgatatggttgagaagtacatctagatgtcatttattaaaagtgctttgtaagactagattgagctgtttctgagggcggtcaccagttgtgttggggtctggtttgagtgccttctgccaaaatgttgtgatggaggtgtttctgcgaccagacacaggataccgctgtgtctgcacccggttgcctgcatggccagaggaaaagtcagttggattaaacatcatggtatacttggctgttgtttttttttaattttttaattttttgggatagggcctcgctctgtcacccaggctggagaacagtgggatgatcatggctcactgcagccttgaattcctaggttcaagcaatcctcccacgtcagcctcctgagtagctaggactacaggtgcatgccacctttcctggctaatttattttttgggtagagatggggtcttgaactcttaggctcaagtgatcctccttccttggcctcccaaaatgctggaattagagatgtaagccaccatgcccagccatagtacttggatgttttagaaggttttccaagtattacataattcctagatgttcacccttattacactccaactattaaaaaggtcaaaattcagcctattttttttcattattttagattcctgtggttgggatattttaacattgatgagaaaaataattgaggttgatatttttacaaaatcatgcggtaataagtcttgatttcatgattcaaaagaatcaataaagcctaaaaataatagattactttaagctgctatgtaagatatatatggaataaattaaaaacctttgtgaattcaggtttattatttttaacctaaaacattctctttggttcattcatcccctcatgtcatgggggctcattggttttccttctttgtcatatttaagtatgatttttcaacaaaacttctagaagtcagcttattatgtcaccattcatgcaaagtgctcatgcctctgattggtccattcactgacgtgacaatttcaggtcctatgtttaaaaagaaggggctggccgggcacgatggctcacgcctataatcccagcactttgggaggccgagaggggcggttcacgaggtcaggagattgagaccatcctggttagcagagtgaaaccccgtctctactaaaaatacaaataaaaattagccgggcgtggtggcgggcgcctgtagtcccagctacttgggaggctgaggcaggagaatggcatgaacccgggaggcagagcttgcagtgagccgagattgcgccactgcactccagcctgggcgacagagcgagactctgtctcaaaaaaaaaaaggaggggggctaaatatccagtgagatgcactgaggaaaggaagcattttgctgaagacagcagcagcaacaaacaatggtctgtttgttgcaaacaagatgtagcttgatttctggtctgacatatgccatatacagatattagaaacgactgtttgaaggccacactggtcatctacaaagtaatgtttaccaattgacgacagggatttaactagattaaaaagatcaaagtgtggtttttctctgctttttaaaatttcactcggaatttgtagctgggccaattcaacacattttacttttcagtggaattgatttttctaatgtttcagaattttaacatatcaagaagaaaacaacgttctcaaagtctggcctctttagcatgatgtaaacctatagaaatgctttgaaatgtgctggtgtaagataagagttatcttgtatgatttaatcatatgcagtgttgtctcagttacgttcagggaaatgtttctgtgtcattcagagatgcttgatgaattaacacctcccaccctgagtgaggggttgacttgttgggagatgatttgggcttcactgggatctgtgacaggtgggggctgggctgggtgtcacaaagagaatagtggtagaaatcgggcgaaggaagaaagaagttactggtaaaaatcattacaccataaagcaccaaggaaataactgagttaaaataggtgaagtttcttttttcccccctgtaacaggagagttttccttatgataattattctgagacttggtcactttgtttttgaatgtggagctgctgaactcattcagaagccatttgctgcctatcaggactttctgaagaagttcttttgcctctgcctaccctctggcaccctcccatggaggcacaggggacccagagctaaagcattaccaggccatctccaaaacaccccgtgtgtgtgtgtgtgtgtgtgtgtgtgtgtgtgtgtgtgtgtgtgcactttgcagcccccgaggtggagaggcagtgtctggatcactgtgaatgcattgccccattggtcagttggggacactgttacaaatccactgaagtcctggtaaaactgtcaagagtaacaggcctcttctgttctaccctgctcacttccacggtgagttaccagcctgggcaacacagcaagaccccatctctacaaaaaaaatttttttaagtaattaaccgtttaaattttttcctaaagatttaacatgatttttccctcctatgtaaagtttactggagagacttgaattacttaaattcatgttaatatgatttttttttaatccaggtcacattttaacaaagtttattatgaaacaaatgaaatttgaactctaaaatggtactccttggcttcctcaagtcacaatgaactttatattttctttgtccttaaggactaagatagttgttttatttcagccgaatcacagagataaccactcctgcaggcccccacagctggcccaaaggggctgtctttctgacctggctgtgttagcactgattgagaaacgcaggctcccaaattttaaattgcctttattaaaaacacaaactacagaaaatgggttaagagtatacgcatttcatcaaacacatataggggaaaaaatccttcaatttagagttaaataactcagctttgtatagtagagttagcgctccagtatctaacaatctcagaatcatctctgaaaactggtaactatgcttccatttttaattttgtcctaaatatcagatgtctttgatgtaagggtagggaatggagaaatattttcaattgtgtatttgtattacaaagaacttgaaatttactttcttagttgattatattaaatgatgtatatattatatgtggtttataagctcaacactggccatttttttagttttattgttaaatggtatttttctatgtttaattataatagatctggctttttctggatagcataaagatcactgaactatatatatataagaaacaagagttctattttagcacaaaggcattttatattatttattgaatccataagtttgttttcgtcaaaaacattccatattatttctgctcctttttatttgtatagtttgttatttaaagaaatggcagtccttcctgttcttaatacaataaaattgaaataatgcacctagtaatgtggccgacatctcttctcaccaccatggactgttttcaacaacagttgatcttctggtctgtgctgagaggcgcatgcatgtctttcgtcacgtcgggcagcacacctgctgtgaaatactgctttcatctacctcttcagaaggcttcttgcttgttgacaagtaccgcaaaggctttattctggactggctatctcataaaaggatttctgtaagactttgcagtgtcattccctcagaacctaggtttgtttctaaagccacggtattgtccaggagcccctgtgtgtggggcaggtagctatccctcccatgtcattagtaatcctttaggatttaaggtacaactggacagcatcattccttccccttattgtgccaaatccccaccatcagccttgccattgccttaagatttgattattgcacccaattacctaaccactaaacagaaaggccaccttcactctttgaaaaaggcaagctgtgcttagaaacactgcttttaagagtagcacatttgagtgtgactttttccccccttcactatttcaaaatggttttgaaatggggtcttaaaggtaagcgccctcatacatgactgaaactttgtgagaggtcttatatttgaatggacccttaatgatttatgtgaaatagaatgaagtcctgtctctgtgagagaacgtgcctcctcactcatttgtctctgtctgttttcatagccatcaatatagtaacatatttactatattcttgaatacccttgaagaaagaaatccgttttctattgtgcattgctatacgaagtgaagccagtaaactagatactgtaaatctagatattgtacctagacaaaatatcattggttctatctctttttgtatctgttgtgccagggaaggtttataatcccttctcagtatacactcactagtgcacgtctgaaatagtatcccacgggagatgctgctccacgtctgaggtcacctgccctgtgtggggcacaccaccgtcagcaccaccgtttttacagttactttggagctgctagactggttttctgtgttggtaaattgcctatataaatctgaataaaaaggatctgtacaaaga

SEQ ID NO: 246 - DNA, 52412 bp, Homo sapiens
  source 1..52412: mol_type = genomic DNA; note = NC_000017.11:46923108-46975519 GOSR2 [organism=Homo sapiens] [GeneID=9570] [chromosome=17]
ccggaagccggaaaccggaaggggggctgtgaggacgtgttccgaggaagccagagccggagccgtggcctgcggggccggcgacatggatcccctgttccagcaaacgcacaagtgagggccggtcggggagcgggcaggggctagacgaggcgaggccaggtgagcctggcttctggggctgaggcctcggacgtcagccagggtagaggccgagtttttccgccagggcactgctggggatgcctccgaagtgcttaatccttggcgggactcccaggtcagccacagacagtgggttcaggctggggcctggagacgtggggcagatgactcctggggtctgcaagttcgtgactacctgctgggtagactgggtgacgggaaactggcacctgcaggttataaaactttgtccagcacttgtcaactcggtgctcctggttggtagacctcgagaggagacacggagtaggagacacggcccctggccgtaggagtgtactgtttaattggagagtcagggcacgtacgggaaagtatttgtattcttattcgatttatactaaagaccacatttttatggtacaaagaaattgctgtccacgtagcattcactattattacttgttaatcgtatctggttacaggttatcgctaagaaaatcaaattgtaatttagtttctcataacttaaattccttggtagtgtcctttattcgcatcgtcctgcactttcggaattgctgagatacgtagttgagtattaatggggccatacttaccctatttttgggggcggggggcagaattatgatttttaccctgttttggagggacggaattttatgatttttattttttattgtaaaatatacacaacataagatttactgttttaacaatttttaagtgtacaattcagtgacattgagtacattcacaacttacatcactacgatccatttccagaactttttcatcatcccagtgtgcctgttaatcagtagcacttcatttcttccttccagaacacctagtaacctctgttttacttctctctatgagtttacctattctagatacttaatataagtggagtcatacagaatttgtccttttgtatctggcttatttcacttaatgttttcagggttcatctatattgtagcctgttaccagaatttcattctgttttatgacggaataatattccgttttatgtgtctaccacattttgttatccattcatctgttgatggacacttgagttgtttccaccattgggctgttgagaataatactgctatgaactctggtgtagaagtatctgttttagtttctcttctcaattttttgaggtatatacctatcctattgagaactttcaaacttatgctgtagttttgttgattaaaacacttaaaatcacactcccaaggcctggaaatgaaatgccctgaagcatgaggaataagagggtgatgatcctctttctctttcattttctaagtttatgggtttcttttattttggcgatgaggtgtttcatttggacaggcgaaaatacagaacctactttgtaatgacagaattttcttttacactggggagccctattctcacataaacgttataggaagggacttaaaactagtctgtgagtaatttagagaaagaatgaaacgaaattatgttcatgttactaagaaagggcctatctttcacaatagcagggcacaatgggcatagtagtgccttgaagttaatctgttatgtatggtcttatctagttaatttagttaaaggatgttgccaagaaggccatgacccattttatattcaagaataactttatttagagagtcttagactacctgttttcagtgcagctaatcacagagaaaactgcatggctcagaagaggaattctaaatggtaccccaaacaaggtgtgtggagtgtagatgctctgtaggcctccaacaatgcacccttggactctagcagcttgccagttttttctattaagggccagatagtaaatattttaggctctgtgggctatacggtctctgtagttactactctgctgttatattgggaaaacagccatagacaatatgtaaactaattgatgtacctgtgttccagtacaattttatttatcaaaacaagcagtgggccagctttgccccacaactattaggccctctgctaccccgacactcattaattcattgaatatttattgagcacctactatgtgctgtgcaccattctcagtgctggcagcacagccctgccctcgaggagtttaccttcttttatgctgcagtatcttgtctatctttcctctccagtgctgaaccaggagtgggagttctggttctagacctccttactttatttttcctcatctgtagaatgatattataatttgggctggttaaactgtaaggctcctttcagttccatgataacagaactgatgactgaatgactttcacaagaaacacgtggagtccagtgagcaccagcaatgaactttcgcaactgcagaaattagtgattgtagctgagttgacacaacagtagctgaacttattaattttactggaactttgaacccagtttgtgattatctcttgccgtgtcactgaatacattgagtacattggaattagattgacatattaaagttacttgaaaactcctgaacctacctgaacaatgaatgaatgaaaataatgaatgaatgaaaacaataaacattttacacttaaatgtttaatttagatgaactttatagaggagctaatagccaggcttctatttttgagatcccaatggttgtaaaggtgaccacatttgtcccctatgtagtccaagatcagtctcctgtcctggaccttatcgtatgtccaggacacaagaagcactacatttaacaagctccctaggtggttttgatgagcaggtaggcttaagaactgttaccttatctcaagaccattttttttcctgaacagcggagcttaagaactattaccttatctcaagaccatgtttttcctttatagattttgccctttaatgagcgaaatgtaaaggcaaagtgagtgaaatgaaaatgaccagattgttgccactacttttaagtaaagttaacaacaaacttacatgatgctgtgtaggttacacagcgttttcatgttcatcatggtcagaggcagcctggatgcaaagtggatgttatggggtggtggggggcggtgagtagtttcatgaacttttaaaaagcacttccattaaaaaattcttcctagatcttctgtaaaccttttttaaagacggctacaatgaccctggcttatttgctactatttctctgctttgttatattatcacccaagcccaccatggaccccatgctagagagggctaagacttctttttcctcatgtccacgctcccaagtcatgcttgtgtatcacctgtttcttatggacttccagtgtgttatgttgtgttagaattcccagttcagtttgagacagattttgcacttggcatattagtagttcccaccttgccattcatacttgctttgttgtttcatatttatgttttcttagcatgaaatgtagccgctggaattgtattattggccacattgtctctgattggttcaaagcaaatagagatttgatgggaaaagtcagtggattatgggcctgtacaaaagtgctttgatgaacgtcctgccatgtacatctcctcagggtatgccagaacctctctaggacacattcctcaaactgctgggtcatagcatggacacatgctttattctactagttattgtcagaaagcatttaaagtgttttaccaatttataatcctaccagctgggtatgagagttctagtttccctgtttccttattaatgcatatgtccccaaactttaaaatatttgtcagtttgatgggctgaagaaatgtgatctcattgcttttcatttgtgttttcctagttgagtgtcattttgtatattgattgaccatttgggttttcttttctgtcatttgcccttttttcatttaaaaaaaatgccttgtttgactttttgtattgatttgtaacaattctttatatattttctgcacgtcaatcctttgttatctgctgcagataccctccagtctgtgccattcatttgtttattttgtggctttggtgtacagaagttttttgttttcatgttgtcagatgtatccatctttttctttgtggtttgtgggttttgtgggggtgggtagtttttggattttgtcttatttaagaaatcttctgtaacccgaggtcatttatgcacacctgtattttcttcagaaagtttgaaagctgctctgctttttccatttgggttttaagtgagcttgagtttatttttatgtgttacctgaggtggcctttttctgtacgggtaacaaaccggagctgttggcatttattgtagtcccttctttcaaaagctcccaaataacgtggggctgtgtctaggctgtttctttcctcttgggccagctgtagggtttgcctttccttgtctgtctgcacctgcactgccgccatattgtttccattgttactgctttgtaagtcataatggcaggtgggacaagtcattcctccccctccttcttcagagtggtcttggctattctttacctcccccctttttattatgtcactgttcgtgttgatcatattaccaactttcagatttttctgttaaatcagcattgaaaatttacctcacagcctgcgtcaggacttccttagagtcctaattctcctttctgtccccgttaccctccggtcccctgtacctgttcccttggttgccctgcttcaggtgtcggctacctcaggctgcattcctacatcagcccccatacctccacacccccgcatcatcccacaatatcccagacttactttccggaagcaacggcctggtctcggactctagcagtgatttctagttgcttctcagggccacaggtcttgcctaggagcaccctggggagtcatttgacagctcacccagcttcttttggtgcccgagggcatatctggaggccatagggaagccctggaaaagactgggcacaagctgaagccaaagttgggtgcctggctggcattggtagatttggggtcctggtttgcattgctcacgatgcagaatggttgctgacctttcctccagcgttggggatgatgtgagagtccagcaggcccccttcatgtgggccctaacttggggaaatctccaccgtgagcaccgggaagtggatggtggggccagcataagcagtatcccgaggactgatcatggaggaccattaggaagggggtcttaaggatgaccttggccagaccgtgggaagcctccagagagtgttacccagatccagggtacagtgttgcatttccaaatgagatggcagttccttcgttccttgatattgtcggagaaggatgtttaccaaacagaaggtccctgtctcagggtcttcctctgaatggtttcctccagtgagtcacttcagcatcctctcccccaacccgattccctttcaagcagcccaccctacttgtaatccacatgtcttgaatgaatttttgcatatcattttcttctatcttccttcaccaaatgatgtctcccttcttcacagcgatgctcagaactctttccatccacataacttacctggtttctctttctcagccccacccctctgtctgcttgcctgtgacaccactgtgcagagctgcccctctttctgtttgtttatacttatgtgtattgcttttctcgtgaatcttcccagggcttgttcatgtctgtttagcctgtcattcctcattatgttgtttctcaaggacaaggattatatctccctcgccctttgactcttcctggtacaggccagtgcttagcacattaggtcgtagaacagaaagtaggattggccgggttcagtttgaggtttatcacttgctgtgtgatcttgaacaagttacataacctttctgggcttcagtttttataaaatgaggatgataatggtactttcctcatagggttattgatttggcagagtatcttggatatggtaagcacccataatctgcctatcagtgttattgttagtagttaagatattagaaaccatgccaaaacgtgggacctaaagtgccacatacaaattttacagttcagtgatgctgtcgatttaaatcagttacatgttggcatcagaaaaattgtctttcctgactgaagcgctgttgattactcctgtctcactcatttcctccctcttcctttgataggcaggtccacgagatccagtcttgcatgggacgcctggagacggcagacaagcagtctgtgcacagtgagtaattaactgtggagaccagagtcctttctctgatgacagggtgctaatgggctgggcttcctgactgcactctgccttgggggcttaatgattcagcgtggaatgagttttgttgttagggtggacagaaaaaccctatggcaaagtcactgatttccctgagtgtgccctttggaatcccacaagtcttatcccccattacccctccactcaacctgacatggccctatgggaatggaagcgcttgcctccatctatcttaatctaattacctagtccttagaggaatgtactccataaaaattcagagatgtttaactggaattggccatttcttctgagctgagaactgtggctttttaggaggattattcagaaacgaacagcaatattaattagtttagttcccacagcatggtttcttttgagaagcatgctggttttttgttttttttcattttttttttttttttctattctgaggaaaggtcctttttctgagttggtcatatggacaccacctgcgggggctgcctacccaccccactgctgggctccctcaggacccattcctcctgttctctcatgtctcctttcgcagcttcaaaagcagctctgttcttggttctgtgccccaccttgttctaatctcaactgtctttgttcactgtgggcacaaagggctaggaaggggcagtgtcactgctgtcacttctttatggggcaagaagcagtctggatgctttcttttgtgcacagtttagcttctttgttcatcggactttgtttgccttctcagcaatctcattgttacatgattagaaatggaaagaggtcattttgactgtcttatcgaaagggatagggaaaatgaccgtatttatcgtatctctttacctctgtggattctttcctgggcctttcctattgatatttggtttattttggggacgtcaacattgctcagcccacccattcttacagaaagctttaagggaagaaagccttaagggaactcttctctgtatgtttcacatactaatcttccccttcctttatgcttttttttttttaaataaaaaaaaaaaaactcattactatagggaattcaattggcagcctttttctaggtatttataatccacgtctgagaatcccaaaggaaaagagacctatatcagaaaatttagcttaaagtatttatttggacaacctttgcatgtttattttctaaaggtaggaaatttatttctacagatttaccttcagcttttttaaaaaattggcattgttatgtcattaacagctatatacatgtacttttttcaaaacaacatttacggcctaacttgaattttttctgttattcattagtgtatacatttttctccttttgaaatatgtagttctagtttattggatattgaaaaaaaaatctgtgatttatcattgtaatttaagttcactatctcttttccagcaattattcttttttcttttttgtacagtagtagaaaacgaaatccaagcaagcatagaccagatattcagccgtctagaacgtctggagattttgtccagcaaggagccccctaacaaaaggcaaaatgccagactgtaagtgctgacctctgacatggctctgatactccaggcccatcaagacaggcttttctccctgggggaggtgatagaatattctgaaaaccaacgtacatgttgaaaaactatgactatgcaaagaaaaagccccctcaaagggcacaattctatctgagtgatgccgctcaaaataaatagcctgtgaggtttgtgactcagaaaccttgtgaccccttacctctttggtgtcattttgaaattttgcctccagttctgttttttgactagatccatagccacctgaagcctaatgttgccatggagttttgttctgctctttggttcctgctgggttcttcttgggttgaaatgaaaaatcacttcaatcagtccacccataatgaaatgctgatctaatgtttgatactccagcatgaaattaaaatgaaaccacccttgccacctccacccccagcgcctgtttccaaaagttttatgaaactttgtggatgctttacctcaaagatgcccttgggcttcttccaggagagccatataatccatagaaggtcaagaagaggtcagtgagcctgcttcctgtcccctgttctctgtcatgcatccagaatcagagcaacagattctgaagtcaagctgctggaatcttgtgtgctaccatctcactttaaccacaagtttcttcttgactttcaacatcgttgatcaaaattagatcttgtggtgagggggtatagtgtggggtggtgtagggagaagtaaggaaacgccgtctttcctcagtacaaagcctggccccctcagattctgctgccctgagttcctggaatttaatctctctctccatcaattccagtcgggttgaccagttaaagtatgatgtccagcacctgcagactgcgctcagaaacttccagcatcggcgccatgcaagggagcagcaggagagacagcgagaagagcttctgtctcgaaccttcaccactaacgtaagccaggcccgtggtgagggtcggcctgcacttgacagatcgtgggggctggagttcagatctctgagcgccatctgttttgggggtgtctgaagaagactgatgatgaggaaaccaactggaaatgacaggaactttgtgcattgccacagagactagacctagacagagaatccctttttctaagacaaaaacctgaagaggaagcagttaaattgaaggggaataggcagaggtgaaaattacctggttgggctggtctgagacagaaaggtggaagttcacatggtggaaacgtttttctgatcagatagagacagatgattagaacttaggccatttgtagagaaggcagcatttcaaagctgcctgcgggcagttgccattgtgccgagtatgtgtgtggctccagtgtcaggtgcattaagatgtttttgcccctagtctgagcagcaatttggaggaatttgttaacagatgtttagggttagatggactgcttgcctgagtctgtctgaaagtgtgttggtttgcatgtttgatttttcagaacccattgtccctgccctttagtcttaaccagatcatttcctgcacatggctgtagaacatactggccttttctgtgtcctgcataatatattccactaaatgaagtgtgctttggctttttgtattttgtttttttacagaggattattttctaaagagatgttagctttctaagccagttgttaaaattcacatcatttcctgctttgtagatgtttaaccctcaatgctgcatccttgctttgcaataaattttcccaagtgtttcaggctgtgccaacatagtttttgcttccccagactaagcagtcaagttacagtgtttaacagttcaaaaatttaatgaactataagacacactaaaagatgtttggattttagatcgttataatgtagtattcaggccttttttaggccaaggatgatcgcttgggattattttgttttttgccagcctggcgtgatgctgtgcacaccgtcagttcttaataaacattgacttgccagatgaaacttcttcctggtcattctaccatatggagctataatacatttttctgagagataatggcccatcagccatactgttttagatgggagggtaagaaagatttgtatgtgaatggcatttcataagtgctagtcaaattactgaagagaagtctctgagtctttcaaacgccagcatcttctgacacactgggcattagctgcatgcagaaaactagttaattcaggcactaggagtaaagcacatgatgaaattaaaagacctgacgcctatctgtgaggagctcccctgttagcaggggcagttgaaaacacgtatgtgcaaaatgattccaaatctgagcagcaaagaaacagtggcataaccttttttttttttttggacaattgaaactggaatttaggtggtaaaaacagcactagtggagcagggcacaatgacacacgcctgtgatcccagcactttgggagaccaaggcagtggattgttcaggagttcaccatcctgggtgacatggtgagacattgtctctacaaaaaaatataaaaattagccgggcgtggtggcgtgagcctgtggtcccaactactctctggagcctgaggtgagaagatcacttaagcctggtaggtcaaggctgctctctatcctgggtgacagagtgagagcctgtctcaaaaaaaaaaaaaacacgaaacaaaccccagcactacttggcaggagagcttgtgattggcagaaaagagaagggaacgctctcacagctggcgaggacttggctcctgcctatagtccactttcagagcaaaagtagagccaccaggatgggcgttggtgtttccctctacagtgtgggtaacagggcaggccctgcgctcagtacccacattcccagctccactggacttccagctctgtgatcactggacacacttccagctgtgtgatcttggacaagttattctacctctctgggcattttttcatctataaaatggggaggcctgtggacagattccttgagcacaggagttggagaccagcctgagcaacatggtgaaaccctgtctctaccaaaaatacaaaaaagagaaagaaagaaagaaaaaagctgggcatggtagcatgcacctatggtcccagctactcagaaggctgaggtgggagaattgtttgagtccaggaggctaaggttgcagtgagctgagatcgcgccactgcactccaccctgggtgacagagggaaaccctgtctcaaaaaaaaagaaaatgcagaagcacagcctcctctatccttagttaactctcagtctacttggagaggtaaactatagataaaatagctaaaggacacgagcaaacatttaacactgcattaaggggaagccatggaaaggaacatttggaaccagctaggttagtgagtagtcagagaaagcctttaggagacacccaatgaggtcttgaaggaatagcttttcctaagaggagatcatgatacagagacaagtatcgttggaatgaacgatacttgtggagtggaactcatttggagagtgacagatctgaggaagttcctcttctgtgtggacagaggccaccccaggcctttgctttgctttttcttatccattagggtccgctgattctttcaccagcccctccggctgttctggcttggccttggccaaaagacagagcagtgagaccccaggaactgactgataagcaaagttaatcaagtgcctgtgtttctttcacaggactctgacaccaccataccaatggacgaatcactgcagtttaactcctccctccagaaagttcacaacggcatggatgacctcattttagatgggcacaatattttagatggactgaggacccagagactgaccttgaaggtggggtccctgctgggggacagagagaaggcctcttgttttagcctcatccaacagtttagtaactgtgtttatattttgattacgtgtcctcaaattgtgatattttgatgacaagacagagcccttgagtttgggatcctttctgttggagttgagttattgtgagcctgaaagtacccagttcctttgccagtgcttgaaacaaaccatgaagtggcctctcttaggatccaggtcttttcccatttactgaacttatcatgaaagtgagtgctactacgaggggtccaatcacaggctgagaaattgtgttacagaatctactcttggaagaatgaagacgtggctgtcctttggtacctcgctttaaggtggctttcccttaggacccctactgtggactgccttataactaaaaccttttgtattttagtaactgaatccccactgtgcagtgttagggctgcctggttgtttgcagtagattagagctttagaagcttctagagcttctaaagcccgtgctggtgatcccagcgactcttcactccctagccttaggtattcctagaagccctgaccagttggcactgctgagactccagcccctgggagtggtttacagaaacattacacagactctgatgtcagtcatgatgtttcagcctctgcccttttcctgtatcaaccctgatggataatagggcgtgggttctgtctgttatcagggtgtggtcccctgtgaatgaagcactcccagccactgagctgtgagaaacagtcactcggaagtgtgagctttatcttagtttttgttggatcatgttgagtctgtcagctccacaggacttcagtacgtttctgaacagtccctgccatctctacgggggagagggtcaggcaagctgcaagtgacactcacctcctgctgacagttgcagtgtctcagatggcctggaagggtggtctccagcagcctgctgggcgctcccctttcatgagagccacctgcagtgacctgaactgatacatgttgattagtctgccctttctttagaaaactgctactctccttttcatatctcagaaaaacagtagaggccttttaggaccaaactccatgtcacactgatgaagagccagtgggggttagagcgtcctgttaaggcacatgctaacttcccactcaagtctggcagcgctggggcatcagcacacctcttgccacccacactgataccagaggggaaggctgtgaggtggctgggggttgagacttgaggtttctaactttcctctgcacacctgtggctacctggtgtttgtctcttgattccctccacctgcctcacaccctgcctccgtcgggattttccacctacaccattcaaaaggaacataggagagggcatgaaggggctaggctgaagcactctgatgactggggccaatttgtggctgaaaatgaatacattttttgaaatttatggtcattttcaagtgatttagaaggttgatccttagcctcatacagtgatgaaataatctgtgtgttcagagccaagcaggactttagcaagagtctgattgtattgtcactatctcggggaaaaaaaaatacaaatacatttctctgatctctgatggcaatgaagtttgacttgtaatttctctggctgaggcttcttaattgctttctgggcagaatgtagattttggattcctgtccatgatgcctaatgttgatctcactttccttgtttctctcagttgctcattaatgtgtatttattaaaaaaaaaaaaaaaggatatggggcatgaggttagatgccatgcatataagttgcagtgggtgatatgtgctgagtgacttggggtctgccccggcattcacttatacttgtttcttactaagaaattgaatgtgctttaagctgaaaattagaaagcagtagggaaggacaggctggatggtttgggttgttggtttaggaataaaatgcccttttgttttggtggtgggtgatgccatctatagaagggttttaggtcattgtgttggtgtctttccgtctttcccacttgagaccctcttgtaaatatggacttgacccacccattgtactcagaagaaacctcaaagattgtactctacaaagtaaataggttggtatcaatgattattggaactagagagccgaggacaagttttttgatgttgccttctttttatagtataaaatattctaattttaagtatttttgttgagatataatttacagacagtaaggtatacagatcatatttttacaattcagtgaatttgggcaattgtatcagcctttgtaactcacactcccatcaaggcccggaccatttcacctctgaaagatccctcgtaccccttcccagtcagttgacccctctgccccaggcagccactgttgtgatttatttcaccatagatgaggttttcttgttattgaacttcatataaaggtattcatgctactcttttctatgtggcttcttcctcccagtatgtttccaaggttcattcatattgttacctatttaattccatgttggtagtcaggtactttttattgcaaagcagtattccattggtacaggtttaccatagtttgttcattcatcttgtgattagtgacaccattgttttcagtatgtatttatttatgtattttttgagacagggcctccttctgccacccaggctggagtgcagtggtgtgatcttggcttactgcagcctcgaactcctgggctcaagtggttctgtcaccttagcctcgcaagtagctagaaccacaggtgcacaccaccacacctggctaatttttttttgtagagaaggggtcttcactacgtgcccaggctgatctcgaaatcctggcctcaagtaatcctcccacccacccctcccagagtgctgggattacagggatgagtccctgcgcctggcctgtttgcagtttttagatattctcctgtgtttttttctagaagctttaattgtggctttagcttttatgtttaattctatgaaccatctcaaattaatttttatgtataatgtgaattgaggttcaatttttacacacatatctgtaagagagatacatatatataaaatacatacctgtgatattatatagtcagtcgttccagcaccatttgtggaaaagacttttctttccacttagcgttgctctggtaccttgatcaaaaatcagtcgacgacatgagagtggctctatttctggctgatattgctttctgtgtattctgggcatgaccaagagaatgtctgttggcaaagctccatctcctgatgccattcacccactcttggtaaagcgacttgatgtttgtttttttttctgttctcttctgccccaggggactcagaagaagatccttgacattgccaacatgctgggcttgtccaacacagtgatgcggctcatcgagaagcgggctttccaggacaagtactttatgataggtgggatgctgctgacctgtgtggtcatgttcctcgtggtgcagtacctgacatgagccagccacgctcagtggctgaacagcattcccacagcctgcaagtgtgtgtgtgtgtgaaagagagaggggggcccagaggccgccttttgaaatgtttgcctgtctgaactgtgaagacacttgggagtgattgtggtctaatttccaacctgctctgttttctgtgacatcttggagggggagctagtgccaccaccatgcgcggtgcttaggaaatgaaagaagtcccgggtctgtctctctcactctcgctctcactgggggagggaaagaatggctttggtggctttgttcacatagctgatgcgtgccctgggaaggtgtccacagtgagccctgtgtgcaggactgtccacacggttcacaccttgtcaccatcaggcctttctggctcctgatagggtggagcaaaagtggaaaggaaaggaaagaggccttttctcacagccattatattaaatagtaggtcgattcacatcctcgtgctcctggccaccctcccctgtgcctcagtgacatgtagatgactgactgccaatacttgtcaccattccctggaagcagctacctaggggaaacaagatgtagtgctattgccgataacaagtaagattttccacactacagctgggtgtttctcttttctaaagtgaggccagtgttatttcccgggagtgttcagtcttgaccctagtcactgattttttctagttgttaatagagtggttggcttttaaggttcagagactgtggcttggcacctgcgcccaggctttgtgggcctttgccccttagaaagtagctgtaggcaaagatttgtgattttccaattacagtctcagctctagttttagtatctctaattctttggttcccttctcttccctgaaatatattagcacctgccagccaggccctcattttgcccagccagtgtgggcagatcccaccgtggagacatctgtagtgtgtatgtccttgtaacactctgttttcagggactacaacctttttccttctgtgaccagccccggattcaggctgtactaataccaggtatattgtggaatttagtataaaggccaatctgtcctgaagtccatctaatgtggtgaatcactgaaagtctcagaaagacctggttagtgtatgttctcatttaccacaggcctaccagccctgggcacagcagcttcatggcaagacataaaatgacactcaaaatccttcagatctggaaaccggctcagtattaaccctacctttggttgtcctgccctacctgctctgttagtttcttgttgcttgaactgtcttctgtcttatttcccttcctttctgtgttcctcttcacctctcttgttcccctccccgctgctctgtagtcatgttggtcctttcaggcacctctgtggcatagctcccctttggtaagttttcttaattgtcatagattaactgagtttcctggatgctaatttcacactttcggttggaggagatctccattgttcctacccctccgggccaaatgggccccaggtttccaaggaaggagcaatctgtgactcctaaaatgggttggggccctgccagagttaaagcagtgactggagggtggactggggggttgcagcatctttagacctagatctgtctaactctggggaggcacattgacatttccattacacacagcactgctgcggtgccagggacctagcgcaggacttttggtaatccataaaatggattctgagactgcgacggcaaggctgtcctgtcccccaggcacccaaggatcctgccagacagcacactttggaggaaggtctgcagggagcagctgagccatttgttcttgaactctgggaggcagaagtccccgcacccatcatgcgtggactgataggacatcttttcgtggtgtgcaccagtgctttccacacttgacagtggttggctttgatgaaccctcatgctgcaccttcagagccagtcctctagtttggaataaaaattgcagaggtggtttttgggtctttaccacctgcggctggtggacagcagccagtgtgtctggacacccaggggcattgagactgcatgttgtcacatgaccacttctcttcacacatctgctttcagtgcctggtgaaaaatagaccttggcctaacagtgtgactctctccaccgcctcagtgtagggaagggtccaggccagggaaggagcaccctctagtggaggcgggggtgaattcttaggtcgagctgatgcaagaaactccggtagccagcctctgtgaccttgtacatgagtttggtgtgcctattgtgatttaaaacaggtgggttatcaagaggaacttgagatctctttattacatggacatttacttcagggggaccactgtaagaaaagccaaactccaagaccaagtaagttagaggagtcttgattttttagacttcactgcggagttctgtacaccctttgccctgatgaatttgaatgggtttgatttgcaaatttggatttacacccattgttttggaagcacatcagctgaataaagttgaggtttattttatttagaaaatcacattttgtaaaagaattcgatattcatttttataactaatggccccctttttttatgtttctaggccagagattctcaaacactgctccatggccaggggctgggctggctgcttcagaagcagtggggaagctttttaaaattacatattcctggggcctaccccagatctgaattagaaccttttttaaatctctaaggtgattttattttattttttatttttgagacagtctcgctctgtcacccaggctggagtgcagtggcgcaatcttggctcactgcatcctctgcctcctgggttcaggtgatcctcatacctcagcctcctgagtagctggaactacaagtgtgtgccaccatgtctggctaattttttttttttttttgtattttttagtagagacagggttttactatgttgaccagattggtcttaaactcctggcctcaagtgatctgcctgcttcggcctcccaaagttctagggttacaggtgttagccactgtacctggcctctaaggtgattctgatgtgtgtattttggaaccactgtctcctagacagaaagcttctgtctcaaagatgatcacattggtgtaaagagcaaaacttgttaagtccaaaataaattcttactgtttatatcctaccttagtccaaaaaagatttgaggagactttgaggaaataactgaaacagatacaaagaagtgaggcacaagaacaaatcaagtcagtgtagaatgtcgacatcaggacaaggaactcaaacgttgtaacaccctaagaaatgtttggggaaccctaatttgactttcagctccagtagccaaagcaaagaaagaaacgtcatctgttactgtctcaaccggggggtgacattttctcaagggaaagcctaggcccttcataaacagcttgcctgtaggcctcacggaggtcagacagggattttcctggctccatccctgccaatctgaaaccctctcacttatgttctccatcatttatcctcattatgcagacaaggggctgagctgtggtgactgtgaaggcctcacaggagtccgagaggagctggcccctcatccagcttggaaccatgggcccacttaatctcccacacttctcgtggggtgctctgctggggtctggggggattgagaggtgtgcaggggactgagatggtgcagcctgctggcatggactatagagctataaggtgtttgctgcagacccttcagatagtatagggcaagttccctgttgggaaataatttcctaactggaaggggagggaatctgaagtgaaagctgtcctcaggccttgcccctagggggcggcatagccctatctgtggctagtgggccctgaacacactgccttaggcctgctgtacttagaagctgagaaaggaaagtgtcattccttccccattttctgtgtccttttcatttcatatggaaggcacatgggagaggagtgttcaggggtgctgggcccccaagtgctgttggtaagttccccaccatggagcctctgtgagccatccctccccgcctcatccccatgtccctctagtacagggttcccaaccttggctctgcattggaattccctcgggagctttaaaaacccatgtgtgggtcttccattcaccctcttattaattggcctggagtgcagccggggcattgggagttgcccaaggcgattgtaatgcccaggggtagggagccgatggctctaatacaagaacatcaacccaaggctagcccgtcccccatgcacttcccctggccgcaccgtgggaaccacttgcagagaccaactaggggcagggatggaagcctgattctccctctggatcagaaggagccagatcccttgtggccattgggtgcccctcattaactgacacctctctgctgagtaaagcaccttgatgtgacaggccagctcttcgctgcccctgcagtgcagcccccagccctccccaccacccctgcctggtgttccgtcctccctggactgcttggtcttctcagaacatgccacacactcagtacagctgcacctttgcacaagatgtttcctctcagatgtgccacaaacacccccacaatcccatgaaacctccaagaagcctgcccctcccctccaaacaacctcatactgcacgcttcctgcggaatgggagttgctcctcaccgcaggggcctttgtgcatcccgggcacgtagtaggcgcaggcgccatcgggtaagcggctgcaggagagcacttgagcccatcccccatgcagggccagcaaagctgttgcagccaggccaggaggaagccagaaggttcaaggccactgatgctacgagccatgtgctcacagggcctcaacaacagcaatgactgcagtaaaagaggagaggcatggggccccgtgagggaaactgtcactcaggactggggagagagaagtagagtgaccaacttgtctgggttttaaagctgaaagtcctgaatcctggcgatccctcggtctgatggtcaccctagataagctaaaggctaggacaggcgtgactaatgcagggtatctaggaagagggggctctcggaggctgactcctggcttagcaattccattagtgtggttccactggcccttccttccaggcatctgtgacatggtggctcctggagagctggcagaggctgggccaggcccaggagggaagtattccaacctcctcagaagacagtggctgacagtacaagaggggacattcatctttattccgtcttccagagccctggcatgtgtccagtgccagtgttagctgtttcagggcagagggaaggagttggagacaagcagccctccgcagtttgcactggttacagcggccggaggctgtggtaagagcgctgagcccaggatgcagagcctggcttcaagtcccagccctgctggcagcaaccacgggccacacacctctcagcctcagctttctaagaatgggggtaacacctgtcccacgtccctttctggggtggacatgaggcccgagtcacgtagtgcttttggcagattccagaggtctgaggcagtgaccctcagcctgggctgcttcctggagtcccccagagagtttggaagtcccgattctgggcctcgctccccagagatgccgagctacctggtctacagtggggcctgggcttcagaatttttaattttcttttttttttttttcctctcattctgttgcccaggctggggtgcaatggtgcaatctcggctcactgcagcctctgcctcctgggttcaagcgattctcctgtttcagcctccggagtggctaggattacaggcacccactaccacgcccggctaatttttgtatttttagtagaaacggggtttctccatgttgggcaggctggtctcgaactcctgacttcaggtgatccacccacctcggcctcccaaagtgctgggattactggcataagccaccgcagccggccttaatttttaactttctaaggagtctcctgtgaggtcgagattgagaaccacggctgtcagtgcatcccaggtgcaatggagtatcattcctgttcagctggaaagacaggatctactcgtgaaacaaccgaggttgagaggtgatagtttagtgcggccattgtggtgggggcattaaccaggaagagctttctgtgagagggcgaggtgatgggtgtgtgaaggacaggagatgatgtgggagcagtcgaggggcaggagtggcctgggggagggaggaagctctaaccagccctggctgctgtgggctctgaggcctgatgtgctgtcttctgcacgacatcctccacgcactgtcctccgtgttccagctgggaaacttgctgctcagaggcctgagttcatgctgctgagatgctactgagagctggagaagctgtcaggctggtgtgggtgtggacaagccctactgtcctaggaagacctgcccatgatcttttgaggtgcaacgtagtgtgatgggggtggtgggatagtgtttgagatggggttggcagacatggcgtagaatcctgactttgctgtttattagcagcctaaccttgggcttaatcactccagcctcagtttcctgtctgtattcagctcaaaacagaattgcatctttgctgggtggtaactcatcagagaggaacaggcgtgggctatgcagaagggaagcagttctcccttctttccagcccgagcaacaggatccacattctttcaaccaagaccacttggccctgctcacctcctggcaacttctggcctcctctaagagtttcttgtgccccaggcatgtgcagggactgaggcagaagctcagggagtggggacctctataggaggggagaataatcactgctgcccccaggacctcaccaggtggttgtgaatgtcaaaaggtaaaaccctggagataaacccctgatcgctgccgggtgctgtccaaattattgttgctatgtgcatggagtgggtataaattccgtgtccatggtgatttcttccaggaaaccatttcttttttccccctgtggcaaagggcagcctctcttacctcaatccaggggccctgggagacccttggaaggcggggcctccagggctgaattccagaacagcagctgtggccacctccttaggccacctgggaatcaattctctgtcgtcactcacttggaggaaaccacatttaaattaaaaatgtaggctgggcgcggtgtctcatgcctgtaatcccagcactttgggaggccgaggtgggcagatctcctgaggtcaggagttcgagaccagcctgaccaacatggagaaaccctgtctctactaaaaataccaaaaaaaaaaaaaaaaaaaagaaaagaaaaatgccaggagtggtggcgcatgcctgtaatcccagctgctcgggaggctgaggcaggagaattgcttgaacctgggaggcggaggttgcagtgagccgagatcacgccattgcactccagcctaggcaagaagagcaaaactccgtctcaaaaaaaaaaaaaaaaaagtaggtggcctgggatattccctttgtggaaaaaaaaaaaagaaatagctcaagctcagtattgcagcccttaaacagaaaagtaattaataattatgagaggccaggcatggtggctcccacctttaatcccagcactttgggaggccaaagcaggtggattatctgaggccaggagttcgagaccagcctggccaacatggtgaaaccccgtctctactaaatatacaaaaactagccaggcaagttggtgtgcgcctgtagtcccagctacttgggaggctgagacatgagaattgtttgaacccaggaggcagaggttgcagtgagccgacattgtgccactgcactctagcctgggtgacgaaatgagactctgtttcaattttaaaaaaacaaaaattatgagatgtcgcggggcagcagtcaagtgccaagcaagtggggtagatatcagagggtggagagcccacccagcagtgagaggaggctgcaactgactgctgcccctggggaaggtgggacgggggccagattcacaggggagccatgtgagcttggttctcagcaggctgggtttggagtggattgtggaaagagtagggacgtattagggtgaagctggaggtgggtgtggaggaaggccaggggaccctgacatgaatgtggatgcaggaaccctcagctgtctctgaaaccaggagggctggggaaggaccctgtgcatgtcctagattctgtggccccaggagttactgctcaggaagcagggcagcctcctctttggtgtatgtgtgcaagagagaggtcgtggtgggctgtgggttgttagtctctctcccaggagcacctggcaacctgaactacccctgctccctccccaccctgccccagatctggtgaaaccaccaaccaggcggaggcagggcagaggctgtcactgccacacaccttcagagctccctacaacttacgttcatgctgctgagatactgatgagagctggagaagctgtcaggctggtgtgggtgtggacaagccccactgtcctaggaagacctggacatgatctttttaggtgcagtgtaatgtgatgggggtggtgggatgatgtttgagatggggatggcagacatggcttagaatcctgactttgctgtttattagcagcctgaccttgggctaatcacccaaacctcagcgtcctgtctgtatagtgagaataataataactacctcaagtggtagcaaaagtgcctgtatttgagagcttgtccgtcactagaaatagtttttttttctttttgagatggagtttcactcttgttgcccaggctggagtgcaatggcacaatctcggctcaccgtaacctccgcctcccgggttcaagcgactctcctgcctcagcctcctgagtagctgggattacaggcatgtgccaccacgcctggctaatttttcgtgtttttactagagacagagtttcaccatgttggccaggctggtctcgatctcctgacctcaggtgatccacctgccttggccttcccaaagtgctgggattacagacgtgagccaccgcgcccagcctagaagtgatttttgtcaggagacagaagacctttagtgattggagtcaagcaggtggagtgtgaagatcagctctgccctttagctgtggaaccttgagcaagccacctcacctctccacgcctctgttctgtcaccttttggagatgaataatgcccatctcacagggcagctgtggccagtgcatactgccatgcctgtaaagtgcctactgcacagcccaggacatagaaagatggtaactgaggttttgttgtggttgttcactagcattgcataggacccaggtctgatcccttcattcagctggtgtgattgtgagtcaaggatctgatatccccaaagaaaggactgcaagtatttgccagtcagactttatttgttacaagatacgatattgcacatgtattcctgtgttcttcatcagaagacctgaattcaaatctccagttcattacctattaggacttgctcactccctctttctctcccagcctcagtgtcctcgtaggggaaatgggaatgctaataatggcctacttcacagaactgtggtgaagacaaagccaatcaagcatgtggatcagtgagtatgcgcagggctgcaagggccagaaatcccaggatcttactgctggggttagatactgatctaaggagcttaagtagtaagaactgtggatgtggggcagcctgcagagctggttgatttagggctcggtgacatcatcaaggctgggcttgggactgcctgggttccctgagaggcgtggaaccatggtgggaagatgtaggaaagatgaggatgatgattgacagatcagtctggaattgttgcctgctaaagttcattcatccattctttcgatagctacgaactgagcacccaccaggtgccagtcacgggactgggccttggagaacagacgtgacccacctgcattgtgatccactgctgtgtaacaaatcaccacaaaacataggggctgacggcaatagctctcagttgctacacctcacagcctctgagcataagaactggggaccaggcgtggctgggatagctgtctctgctcagcgatgtctggggcctcagatggaagatttgaaggctgggaggagaatcatctgaaggttcactgatgtggctggcacacagtgtcgctgggcacacaatgtcgctgagccctggactggggctatcctctggaacacctgcacacggcttctccatgggaccagggcttcctcagggcatgatgactgagttccaagagtgagtatcccaagggagagagcaggtgggatctgtgtactttctatgaccaagcctcggaagtcatagggcctctgttctgccatactcctttggccgtggtgatcacaagccatatggtcacaagcccccagctgcctctcagtgggaagaatgtgggtcacattctaagaagagcaggtgggatggaattgacacggtgggtggccatctttggagagtacaatctgccacactccccttgaatgatgctcacgtctagctgggaagacatacatgagcatgcagcaataaagtgcacaaaccgtcacacaggtacaaggtgcttagggccatggcagaagtagtatctacttaccctggaaccctggaggaggcttttgagctgaatctcagatgagtcagactggagcaggtggagcctgggcggacggtctcagcagagggagtcatctagcaaaggggtgtgctctgggaagggcaggaggattctgtggctggagctcaggcttcaggttcagtgtggaggagggaagaaaggctgcagaggtaagttgaggccagacgcggggtgcctaagagcagactcattagtccctgccctcctccagtccctggtcctctgcacacagtaggcacttcataaatattgattgaaattggagtgagcagtgtgtgttgaagaggaaaccaaatcccaaagagaggccgtggggcctcctggagggagcatgggataaagacagggagaacccactttcatatcataggaacttgagattctctttctcagttgttgcctttccagtatttttcaatgtctctgcaagagttcacgggggctgagagcagcccctgagtcacttctcgttcctatccctcacccccagctggattcttgggtcttcttccctccatactggtccccagagagtgtggactctctgcctcttgtaggtgaggaggaggcggctggctgaggaggtggcagaggcaagtgaaagggccaggagggtgaggatggagagaaggggagggaaaagaaggagatggagggggagaagatgaagttgctaagtgtatgatcagtgccagagccaaaagcccatactacaaattgctttttccttcacacttgtcccagggaaaggcccaattaaaatagcacctattggaaatggaagggtaattggaccaggcagcttattaggcccatctccaagagcattcaggggcagccatgagcttcaggaatttccaccatgtgaacttagcgggggagatgaccccgagcagcaagggctgacaggatggggctgccccaccatcctgcctgcccggggccctgctcagtggcttgagagggcagggactggtctgtgtgggggcactcttctgtggtggggtagttcagtgggctgagacatggggctgatgagatcaaaactgtccagttccaaatcccagaacagaggaaaagcggggccagaagtggtcttggggaccaccaagccagactttctgggggagaatgacttgccaagggtgacccagtcggtgatgagagatctggagtcagagggggaagtcaccgactcccaatccagtgctgctgcccagggacagtctcaccatgccacgctgtcctaaactagcctgtggccctcgccccaactacacgcccatggcctgtcactgtaccatgttcatgccaggcacagctaagtcagggtggcaggagccacgccaaaggcttctccagcttgagggcatcatctctccacacccctcagttattgacagaaactggcacacgcactgccagaccacgctgtccctaggaggaggcagacagaggtggacgcagcccacaggcttggctggaacggcgggttccagaggtgcccgctggccgcccacagtgaagtctggtaggggtggcactctccccacaggttacccattggaccagagctcatccacccagagcccatttccatgacaacagcaagctccttacccatcaatttcatccttaaagattcccaccccagctttctgagcctgggctcctcgcccagctgccgcgccagcccacgtctccagatcacaggtttagcagtgacttgtcaagctgccagagagagcctcctgggaggtgccttttaactggcgtagcccttgaaaacgaccatataatcacctgctaattggattaggaacttgttcccagggactttcttttgcccccatgttgaggccaccctactccattcttccggaacttagcattggagagcttccccgttcccctctgcacaacctcccaggccagggtaatgctgacagggttgccccaaagtcagatagtgacacaagaggaaaaggaaacctctaattttctggggcccaggtacactcagagaggaaaaatggcccagggtgggagaacacacagggccctctcttcccccactctgcccgcctttcagccttgcaagaaaatctggcttttccctcggggtgtttgcctcgctgcttctcccccccagacatcacctccctcacagcccagctccatgttcacccccaccaggaagtcttcctttctaaaccgtttttctctgcatcctctcagagtggctatatttggttcctgcaatataacttcgtatatattgcatcagggagagggggagattcctgaagctgggttgttattttttgtgaagctatttttttggtgcattttctttctattccagaaaattcttatagtgggtggatgtcatttatctacccagcatctcgtctttggactacaaatccttatccccttctgctggtgccattgtctctccttcctgtggaaaacctgtgccacgggactcagcgagggctgcctcctccagcagggtcagcgcctgaagcaggcctggtccatgcaggactgggtcagcagcccaaagcagtcggtttggggtgaccacatgactgcgcggtgggccgatcagaatcttccctggaattcccatagacactgctggtttcctgaccaacatccattcctcccctattctcactagctacacgccacttttgttgatctagcaagaagtccagttgaagatatttgtgcctctagactttcttgcaggtaggggtcaggtcacccaattctggtcaataagatatgggcagaagttgctgggagagacttctgggaaagggtttcaaaaggaacatggctcctttagtccactcttaactgatggctgagatggagacatcttaacctgaaggcttttattccagctatgtgagaggccacctgagaataaagtgatccgagaagaaagcaaaacagagagagagacagagaaagagatggcaatatcagttaagtccctggattgagccatgcctgaagcctcagaacttcccaatttggagagccaatcaataaatccttttcctacttaagctggtttgcactggatctccatctctttcagtgaaagacccctcagtgcaaacctccacaaaaccaaacccatgtctttccctgcctctgttctctcctcccaagataccccacataagatgctcgatgcaaagctggcacacaatattcattcaaatgactctgagccccccaaattctttttgtttttaaattttattattattttttatttttttattttattattattttacgtaagttttagggtacatgtacacaatgtgcaggtttgttacatatgtatacatgtgccatgttggtgtgctgcacccattaactcgtcatttagcattaggtatatctcctaatgctatccctccccactccccccaccccacaacagtctccggtgtgtgatgttccccttcctgtgtccatgtgttctcattgttcaattcccacctatgagtgagaacatgcagtgtttggttttttgtccttgcaatagtttgctgagaatgatggtttccagcttcatccatgtccctacaaagaatatgagctcatcattttttatggctgcatagtattccgtggtgtatatgtgccacattttcctaatccagtctatcattgttggacatttgggttggttccaggtctttgctattgtgaatagtgccgcaataaacatacgtgtgcatgtgtctttatagcagcatgatttataatcctttgggtatatacccagtaatgggatggctgggtcaaatggtatttctagttctagatccctgaggaatcgccacactgacttccacaatggttgaactagtttacagtcccgccaacagtgtaaaagtgttcctatttctctccagcagctgttgtttcctgactttttaatgatcgccattctaactggtgtgagatggtatctcattgtggttttgatttgcatttctctgatggccagtgatgatgagcattttttcatgtgtttcttggctgcataaatgtcttcttttgagaagtgtatgttcatatccttcgcccacttgttgatggggttgtttttttcttgtaaatttgtttgagttcattgtagattcttgatattagccctttgtcagatgagtagattgcaaaaattttctcccattctgtaggttgcctgttcacgctgatggtagtttcttttgctgtgcggaagctctttagtttgattagatcccatttgtcaattttggcttttgttgccatcgcttttggtgttttagacatgaagtccttgcccatgcctatgtcctgaatggtattgcctaggttttcttctagggtttttatggttttaggtctaacatgtaagtctttaatccatcttgaattaacttttgtataaggtgtaaggaagggatccagtttcagctttctacatatggctagccagttttctcagcaccatttattaaatagggaatccttttcccatttcttgtttttgtcaggtttgtcaaagatcagatagtagtagataagcggcattatttctgagggctctgttctgttccattggtctatatctctgtgttggtaccagtaccatgctgttttagttactgtagcgttgtagtatagtttgaaatcaggcagtgtgatgcctccagctttgttcttttggccttggcaatgcaggctcttttttggttccatatgaactttaaagtagttttttccaattctgtgaagaaagtcattggtagcttgatggggatgacattgaatctataaattaccttggtcagtatggccagtttcatgatattgattcttcctacccatgagcatggaatgttcttccatttgtttgtgtcctgttttatttcattgagcagtggtttgtagttctccttgaagacatccttcacatcccttgtaaattggattcctaggtattttattctctttgaagcaattgtgaatgggagttcactcatgatttggctgtctgttattggtgtataagaatgcttgtgatttttgcacattgattttgtatcctgagactttgctgaagttgcttatcagcttaaagagattttgggctgagacagtggggttttctagatatacaatcatgtcatctgcaaacagggacaatttgacttcctcttttcctaattgaataccctttatttccttctgcctgattgccctggccagaacttccaacactatgttgaataggagtggtgagagcgggcatccctgtcttgtgccagttttcaaagggaatgcttccagtttttgtccattcagtatgatattggctgtgggtttgtcatagatagctcttattattttgagatacgtcccatcaatacctaatttattgagagtttttagcatgaagggttgttgaattttgtcaaaggccttttctgcatctattgagataatcatgtggtttttgtctttggttctgtttatatgctggattacgtttattgattttcgtatgttgaaccagccttgcatcccagggatgaagcccacttgatcatggtggataagctttttgatgtgctgctggattcggtttgccagtattttattgaggatttttgcatcaatgttcatcaaggatattggtctaaaattctctttttttgttgtgtctctgccagagccccccaaattcttatctcaacaagagtcaaataaagacttgaaaagacttgacatctaaactacacttattaaggaaaaactcattaattccctatggagatctgaggccaagcacacctctgaagcagtgcatggcttggaatcctgtctgctcttcaccgaaccattccttctgcactcacctcctccagaaagccttccaaaccaggtcttaactccatcatcctaactaccttgtcagcactcacttttgttaacactttgattcagcagtacttgggttccatgagtatttgagcatagttgtgtgtgtgtctcatctctctcaccccaaacccactccaccccaccctaccctaccaactgactctcctgaactctctagagcaagagctgtgtctccatcagactagcaacttcctgagggcgaagactctaattccttatcccattgggatccagatgctgtctctcctcacatcagactgggaatggaaaatctttccatgccccatggagcctccttggcaagacaggaagatacggagtctgaaccccatagagatggagagtgggaggaagaaggtagccgggagcagttagcaggagggtccatcttaaccttcagggaaaaaccgattcacagcacataaagctagttctggatcagaatctgttattcaacaacacttgcaagggtttaactcagatcctgtcccctctggggtagaaatctctacccgcctaaggccaggattctgccttgccagtccttttttttttttttttttttttttttttttgagacagagtttcgcttttgttgcccaggctggagtgcaatgctgccatcttagctcactgcaacctccacctcccgggttcaagcgattctcctgcctcagcctcccgagtagctgggattacaggcatgcaccaccatgcctggctaaatttttttgtattttcttagtagaggcagggtttctgtctctactggttggccaggctagtctcaaactcctgacctcaggtgatccacccaccttggcctaccaaagtgctgggattacaggcgtgagccaccgcacccagcccttgccagtgtttcttatttctcttgtcccttgatgattgtgtaatgatgaatcccttcgttaggaagcttgtcaaatgcaagtagacgctgagggggcggccatgtgtctactgtctcgtggctcctgttggatgggagtagcctgcgtggctgccagtgctggctggagaggataccaccatctgctctcgtcagcatgctgccctgcctttgagtcccctcactcccgccccaagactaaatccttgaaagagcagctccacagcgagcatgtggcaagaaaggatgctaatggagggaagaaagtgatgaatccccaaaagagtcagggaaagccacacaagaaggaaaaatagctgcataaaggttgcgggggtgagctgggcgaggctgcccgctgacaggtgaatcaagactccagagagctgggtacggtggctcacacttgtagtcccagcactttgggaggcccaggcgggtggatcgtgtgaacccaggagttcaaaaccatcctgggtgacatggtgaaaccccgtctctacaaaaaatacaaaaattaggcacagtggcatgtgcctgtagtctcagctactttggaggctgaggtgggaggactgcttgagcccaggaggtggaggttgcagtgagctgagtttacatcactgtacaccagcctgggcaacagagtgagaccctgcctcaaaaagaaaacaaaaaaagaaacccaggctaagcgctgtggctcacgcctgtattcccagcaatttgggaggctgaggcaggtggatcacttgaggtcaggagtctgagaccagcctggccaacatggtgaaaccccatctctactaaaaatacaaaaactagccaggtgtggtggtgggtgcctgtagtcccagctacacaggaggctgaggcaggagaattgcttgaacctgggaggcagaggttgcagtgagctgagatcatgccactgcactccagcctaggtgacagagtgagacttggtctcaaaacaaacaaacaaacaaacaaacaaaacccagacagcaggaagcccaggtgaggagaaggggagaggcaaacaggacatgaaggaagatttgtttggtagagagaagggaattgatggcagccccaggatgcagtttgaacctgtatttggtagaagcagcgatggggaaatgggccagatatcggacaggagagagacatgatacaatcagtgctaatgatccagacatctccatggaggaggatgagcactcaggggaaacggaggcaaggcactcacccaggacgctgcagcagggatcagtgtgcctagcatggcaatggaagtgagagggagtcggagatctgactgagcgactcctaactttgagagttggtggctcattcccaccaaggggcttatggctgctgctttgggagtctttgctgccaaatgtcactggccgggggtcacctcacccgtaacccatggagagtgggtctcctctccccatttgtgcaggactttctttccattggcagcaactggccagggggcctcagaggagctgggaatggggagcaggctgccaagaaggtttggtcaggccaaccaacttggagggcagggaaagaagtggagccgtcaaccttcacattttacaggcatacaaatcacacaccaaataaggagaaatatgggacacatttgcacaataattcaagacaggatctccatggcaacaattacccaaaaatccactcctgacagttgcaacagcgggagctagcaaagaagactgggggtgggaaacgtgtgtgggggctcagagaatggcttccttttattctcgaactgaaggaagtgctgacggcaggaagcaaggtgtctcacagcctgactaagccaagagccactggaagtaggatctggaagaagccttagagacgtctgtgtgagctccttttgagctgcttagaggcctgggtgtgggataccacagtgagatgtgccagtgggatgtgccagctcaggggagggggccatcagggcatcgccctcccaccactccctctgatggacaagagttctccctagcctccagaggtcctcacaggggcacagtgagagatggagccaacttccggcgaagtcaaaggttctgggacatttaagtctgcctgaaaactgagtccagtccatagaaagctgacacatgacataggttaggagaacggagctctagcctgctctgctcccctcccagacttgctgtgtggcccctcagtttcctctacagtgaaatgtacaacctacctccaagaactattacaaggctgagtgaatagcatgagatgggaaatgcttttaccaaaatcactgccaatgcaaaaataagaggtttctgtgcagccatgaagagtggcctgagaaagatagctgcatgcaaggctgtccttaacaggcagaggagtttcctaggtcaggtgagagtcagtacaaagactgtggtgggaatctagaatgtggctaggcagcgatactgatgagatggtgggaagtaggaggttgggcgtagtggcagaagtgtcacctgtgtcctaccaccagacagatggacagactgactgtgagctcagagcaggcagtagagtgtgtaacctccaatttacaaacatttttaatcacacaccaaaaaggaaaagcattctgctttctttttggagtaacataaatccaaccccgttccccacccacatccttttaagtgtatttctttttgtctggtagtcctcaaaagccattggctatttttcagatcctagagctcagattgccttaaatcgcttgagaaaggagagttttttcatctttctttttggaactaagactttagagcaaaggaaaaggttcttctgggtttcatttgcatttggaagcccaggtttttgggaaaaaaacactctcaagagcttattactattataaatgtttagccatgtgatttttcctcaagagggcacccaaaacttttcataccaactcccatggatagcagtccccttatgctgaattatggtgggaaaggattaaggtaggacatttcttgagcatttttttcctattctgggctctctcctttgccatcccactctccactacaaaacttttcccttcccttttgtctcactaaccatggaaagtcctccaatccttggaggtcctcagaagccattcttcccaccactggagctgactttcttccctctcctggactgagcaggaagaccgattcatgagagagctcctctaaaggaattcaggctgggccctgagacaggacatcatggagtggactttggagtggccacaatagtccagatctggtcctcagcagtagagtccagaaacttggttgggccaggacatccaaaagttgtcagcctctcaggactgattcaggctaaccaaattcattgatgggcaaccagaatgccatttcctgaataatatatctaccaaaagactggtatccaaaatatggaaagagctctcaaagctcaacaataagaaaacaagcaacccaacttttaaaaagcaaaagacactttactaaagaagatatacagatggcacttaagaacatgaaaagatgctcaacatcatcattcaatagaagacaaattagacacacaatgaggtgtcactacacacttggcatacatacaaacaaacacaacacaaaatctgacaatatcaagtgctgacgaggacatagagcacctagaatgctcacacattgctggtggaaatgcaaaatggaacagccactatgaaaaacagtttggcagtgtcttacagagctaagcgtgtgcttcctatatgacccagcaatctcatttctaggtatttacccaagtgaaaggaaaacttttgttcacacatacataaaaaaactctacatgaggatttatttgcaatcaccaaaacaggatacaacccaaatatccttcaactgaagacagataaaaatttaaatttaaaaacctgtgatacatccatccaatggaatattactactaagcaagaaaaaggaacgaactactgaagtgtgaaacgatatggatgcattaagataagtgtgagaagccagatggaaaaggcagcttattgggtgattccatttatttgaaattcaggaaaagaaaaaccacagggacaaagaacagatcagtagttgtctgcattaagggaagaagagtttgtggatttggctacaaagtggcagcatgaaggagtatctcgattgtgttcatgatgacacaactctaagtatttgtcaaaatatatagtgctctacgtcaaaaaagtaaattttaccctaaatttgaaataaaaataaaaggcatttataatgactactttggggagagtttaaaaaaaacaaggtgggaataaaatactagacaaaaataacttggtagatgagagagataattagaatgtaaacatttaaagtcctgattttgccgaggataaaggtaaagatattgattaatttcagacttttggaacaaggatgcttttaaaaatggaagggtaaccactaaaaaaacagaaataatatgtataattttcaaactagtagagactatgaaagaagtaagagaagaaacaaatatctgtaattttagcactttgggaggctgaggcaggaggatctcttgaggcctagagttcgggactagccttggcaacatagtgagaccccatctctacaaaaaacaaaataactggaacatggtggtgtgcatctatcgtcccagctatttggaaggctgaggtgagaggattgcttaagctcaggagttcgaggctgcagtgagctatgatcacgccattgcactccagcctgggtgacaaattaagactctgcctctgttaaaaaaagaagcaaatgaaaagtgtagcaacagcaaatcagtaggtaagatgatagaaataatccaaatatattagtgatcacaataaatgaaaagatgaaatacgtctgtaaaaagattatattttttaaaaaaggtccagctgtatgatgtgtacctaaaatataacgacatagaaaatttgcaagcaatgagttgaagaagagatacacaaagaaactaaccaaaaataaagctagtatagaaatattaatatccaacaaaatgtacaccctttatctaatgcctactgtatgcagagccctgtctgaagcctgtgagatgacacaggagaaacagaaacatgactgctaccctaggggattatagttaggggctgaccaatgattccaaatcattttatttaatcaacaaatacttgttcaaaaactgtgcaaatccaaaaacatgatatttctaaaatgaggataagggagtggggcatagttggaattccaaaaataaaaataggggccaggcacagtggctcatgcctgtaatctcagcattttggccgaggcgggcagatcatgaagtcagaagctcgagaccagtctggccaacatggtgaaaccctgtctctactaaaaatacataaaaaattagccgggcgtgatggcatgcgcctgtaatcctagctactcaggaggctgaggcaggagaataatttgaacccgggaggtggaggttgcagtgagccgagattgcgccactgcactccaacctgggcaatagagtgagactccatctcaaaaaaaaaaaaaagtattgatcagtgtagtagttgattttcaaagatacccccaatgaaccatgcctcccagtgttcatgcccttgtttagtctcctcacacatcaaatctggactggccctgtgactcattttaataaacaggatgtggcagaagagaaagtatgctgattctgggccaattattgaggtctggaaactgcttttgcacttttgggaagaaagctgccatacatcaagtatagctatgctgctgtctagactgtgtggagaagccacatggaggaaatgccatgagttgataaggagaggaaagaggtccagccatctcagcagagcccagccttccagctgtccctgccaaggtgccagacactctagccagccaagtccttgaaggttgcagttcctgtcagtatcacgtgcagcaggactgagcagttgagcccagttaacctgcaggatcatgaaagataatgaagtggctaccataaaaccagaaatttctgggagtagttatgcagttatagataaccaaaagaatctctttcagtgtgtgctagaccctctgctaactcatcattttcatcaatgatgtgatttaatcctttcaaacatacttagaggtatgtataactaactcccattttataaatgaagaaactgaggcttggaaagaatgccacatggctaataaagaatagaagcagggcttgaatcaaggaagtcttgataagggacttcacactctcaaccactgcattatgtggccaagtgggagagctgagggatgaaaaacacaagacatttcacaataaatcatgatgtctatatgagcaccctttaagctttctattccttgtctttcttcatcctgtgctactgaccaggaaagtggattctataaagatgatcagttaagtaggcagatgacagccaggtgcagtggctcacgcctataatcccagcactttgggaggccaaggcgggtggatcacttgaggtcaagagtttgagaccagcctgaacaacatggtaaaatcccatctctactaaaaataaaaaaattagctgggtgtggtggtgggtgtctgtaatcccagctacttgggaggctgagttacaagaattgcttgaacctgggaggtggaggttacagtgagccaagatcacaccacgcactccagcctgggcgacagagtgaggctcggtctcaaaaaaaaaaaaaaaaataggcagatgatatagttggagattttattatagtttggacacacttcataacaagcactaatcatcctcagtgttcagttgtcacttgagaaaatgtaaatgctacatctgctcactgcctgtcttttcttccagacaaagaacatatgttcttgacaagggagtgtgccttgttccccacccacagtcaccactggagaagcttgagttttggagaggtggggactggctgaattctctttttttctctttttctcctttttgtttttaaagagaatagcatcttgctctgttgcccaggctggagtgcaatagcacaataagagctcactgcagtctcgaactcctggtctcaagtgatcctcctgcctcagcctcccaagtagctgagactacaggagcgtgccatcacacctgtgtaattgacttattttttgtagagggtctcactttgttgcccaggctgatctcaaactcctgacctcaagtgattctcccacctcagcctcccaaagtgccgggatgacaagtgtggctgagttggtatgggctctcctttccccatatccaaggcaagcttccaggattcttctgggacatcaggtgttagggaccatcttagtccctacctcagtttcacacatgagaaaattgaagtccacagaggaggtgtggcttcatcaaaaacccactgagaacgagtgttagaatcaggctaggacacattggactcctcctccagggctctctgacatccaaggccctttgaaatctctctccagctgcaaacagatttctagacttctgatggaggtgatctgagatgagcagcctctaaaagcagcctctgcgagcctctaagagcagccgggacctgctggagaacagaacatggcctaggagcgcaacagccaagtgttcagcaccacggacagcttcgctggcctattgctggggaggccagaggtggggaggctggttgtccagcaagacagagtgccatgggagagagaaaaaaacatgggaaagatctcagagaccatctagtccagcctcctcgatttggatgggaggagacccaggacaagagagaagtgacttgtccaaggtcacacaacaagtcagtagagagccagagatgggagctgacagcctacttcctcacacctcttcaaggccctcagatacctggtgtccatgacttattagtggcacagccagaccttgattaagggctccaaaattaaaattacctgtccttggaaatgacaagaaaagaaaaaaggagaaatcaaagaaatggaaagagcacccggccctgatgggaaggtctgtgatttggcctctaactgcaaggctttgacaggagcttcctactttccaaggtgatgtggcctttcagaaacaatttagttaccatggcaacctcattccaggtttcatctccatggcaattcactggagtttttcaccctccggtaagtacatgtgtgatggcccagacatgtatcccagaaacattaatataaaatcacatttttagaagtggagtatctcattatcctagtctgcagccagaggaataacaaggcatgttctcgggtgggcagggcccagggcatagtggaaggatgtctctgggggcagctctgccttctcactgcaattgcaaacctgtcccagtctttacagctagtgcatctcaacctcccatgggtacaaatgatttctccttttctgcatcctccctggtgccctgctcatgacaaagcctgagtgttgcctgtgctgacaagaagtgctgggacaaggagagagaaagctggtccttctgactatgacttctgtggcaccccagggctcctgcttccctgtccactgtgccccagattggggcaccctggagcagttcccagcttttgtgttggaccttgcttgtctgatctgtggactgtgggcttccccctcaacgtgacctaatctgccatccaatttccaggaaatcctcgtggtttctgctccacccagggcaccccttctgttttccagcaatgctatgccttctctttcttttttttctgagacacagttcactttgtcacctaggctggagtgcactggtgtgatcacggcacgctgcagcctcgacctcctgggctcaattgatcctcccaccttagcctcctgagtaaatgggactaccggcacacagcaccatgcccagctaatttttgtattttttttttttttgtagaggcggggtctcattatgttgcccaggttggtcttgaactcctggtctcaagtgatcctcttgccttggcctcccaaagtgctgggattacagacgtgagccactgtgcctggctgctatgacttttctttaatatgtcctgctgtttataatgatgcagggctggagtatttagcccaccatcttgacctaaccttctctttctttctccacttttaatgtctataaataaccatctactaatctacttataatatgtctaacgatggatcatttctctcctcctcatcttcttcatcatcgtcaccagtagcagtagtactatttcgtgattgagggatcaccacagagtaagaagtgctcacaaaaatgttccatcaacatctcaaataatgagacagaaaaatcaaggcatggcttcatttaaaaaatgtaattgagagtatgaaatgtactagctatgtaccttctcagaccactttttttgagacagggtcttgctgtgttgcccagggtgcagtgcagtggcacgatcatggcccattgtgtgacctcctcacacctcttcaaggccctcagatacctggtccttgtgacttatttagtggcacagccttgacctgctgggcttaagcaatcctcccatctcagcctccagggtagttggaactacaggtgcaccccaccacacccgattaattttttgtattttttgcagagacaaggtctcaccatgttgcccagaatggacccgaactcctgagctcaagagatcctcctgcatcagcctcccgaagtgctgggattataggtatgagccaccaccctgacctccaaataccttttgaactcaggcttggatttgaactctggttctatcaactattagctgtgatttcagatcagtgacttgagcaatttgtgccttgtttcattaagtggagatgacaatagcacctgccttgcaagaattatttgatgtggccgatgagaaaaatcagaattatgaaaagtgcttcacaccattcctggcatgtgaagagccctctctaaatggccattatgctaattagcaccttaaagggaaatcattttcatgaaattttatttgaatctggctagagaaaatgctcaccttcttccttgtgttttgcttatttgattaaatgtctttgatttctgtgatgtgtgaagtcccttgaaagcagggctgtgtgtccaacaaaggtttgtggccttcccgcagtgaattgtgtgggaaatacaaacacagggaagacagttctggtcctcaggggaagtgtagtggggaagacggacatgagaacctaaccataacaggatgcagagcgaggcatgtgccatgcactgtggccgtgttacctcctggtttggagtgtgagctcagacaccagtctgcctgggtttggatcccagctctgccacttattggctgcacaacctcaaacaagtctcttacccttgctgggcttcagtttcctcaaatgtaaagtaaaaatggtaacaggagagttaatacatgaacagaggctaacacatagaagggctcaatcaacattagctgtcattaccaagatatacgaagatagtatggaggggatatgtgagaagtgattataattctgtttcatgggtgaggttgtacttgagcttggtcttggagggtaagtagttctcaaagggcgaagagaaggagagaggcattttgggggaagcagagcagcaggaacagaggcatggagtgtgaactctgcagtgttctctgggtacagcatgggggctggatcacaggtgcatggagagaaatactgggaaatgggccggtgcagagggtttaggacagcccctaggaggtcttgaaaactggctcaagcattcagacagttctgtagacaacagagactgactacaggctactggagagaagcaacatggtgccacctgtgttctgggcaaatcaccttggtggcagtgaaggaaagataaagaggggggtagggggcccagagaccatttgggggctatagcacagcccaggcaaaaatgtcaagagcttaagcagggaggtggccaagagggagagccactgtgaacacagaatccgacaggcttggtgaaggagtgggcagagtcagacagggtttcctgctaggtggctgggaagatgacagtggtgatgctcttacagaatcaggaccctgggaagaggaccagcctgggatgggggccttcttcagcttggggcatatggcatggcccagtgcagacccttgtatgtccctcactgctgttccttctcttcagctccaacaagccccatagagcaccctgcaccagtcaggcactcagtgaatacctctgagtaaggaaccacagggaaggaggcgtccagagacctccctgctccaacttcctccattccagacccagcctcttcctctccctccgcactgtggacacccctgaacatctcctcctgtttctgaatctttagggaaaaaatgtcccaactctgtctctcagcactgcctcctttctctgccccaacccactgaatgtgtgactcattcccacgcttacatcctaaagccctgcctggggtgtccctccatgcggggaccgctggagcagagaccatcaccatcataacaccctccaccagccacccagcccctgccatgggaagagcaccatgccaagctcatcaatcaccatcagatcctctcgacaaacacagaggatgggctttctgattcccattttagtgtgtgactcagagaacttagttggcttgctcttgcgcacacagctggttctgtgtaatcatacagcttgaacaggtcccctgccctctgcctgccttccccaccagcacctctacaatggccatgcagatcttcaggacacaaacagaaagcaggggctacctgagactggaacatcagggcatctcttgggatcagcaccacctgcagtcattgaatgcagaagggccttctaatcctgggacctgtccagacccccaaggattctgatgtaattggtctggggtgcaaccccaaaagcaggacttttaaaagctcctccaggtaattctcatgaggttgaaaaatgattgttctaatgggtcctaccctgaaagcatccctgccgacacctgccccccaccacagtcaccgtggacctgctctgctgcctccgtactgagcttctcatgctggatgcagccgggccatggcacaggtcctcacagccaccggcctcccaggagaagcggaagccgatctcgctctggctcccctccactctggctcccttttctgactccagatacttctctccatccaccttcccaggtttccagagccttcttatggtccaaagctccccctctccacaaggggaacactctagctgcccttctggagaggactgaagaccccaagttgactccctggtccttgtgccccctggggggccactgagagccgggcagggaggctggctggtgtcagcaggaaggagggtggtgggccaggtggcagagtggccagaaaggaggcagccttcaaatgctggttccgccacctcctcccactgggctgtttcccctatgtcacagtgagagagctgcacaggaccccagccccaccctgcagaggggccagagttgctttcttatgcctggagaccctaaacaaccgtggaacgatcaggcttccctgctccaggctgggaccagcctctgtcctgatggccagaagctctgatgagcaggtatagacagcagacagtttccttattcagcaataaggacagtgtgcttggtggataaatgccttaaacacggaagagttcacgggaatcaaaacaatgaaagaggcttggcaaataacttcaaaccagtgagatgggtccccctctgtggggactcccaggcctggcctgaagatttgagtgtataggaaggcatgaggtcccccaactctcccattgcaagagaggtgcttgttacctttcgcgatccccttgccccctctctggtgcccactttctcactctgcatccctcaactcccacctctgccccagctgccctggtgatgtgcggggtgggggaacaaaaaacacaggctgtgcaagcagacaccgggggtcaaatctcctggctctagctgactacagctaacctctctgagcttccagtttctcatctgtaaaatgacgatcatccccagcatagagtggtgctggaggattaagtaatgagataatatctgtaaagcactgtgcttagtgatggagatcagtaaatgtggttccatcccacggctgtcctgcctcatctcccccatcatctcaaaacaggtacagcttccatcctaaagcattaagatgcttcctgcaaaaagatctcaagaaagaccagccgcggtggctcacgcctgtaatcccagcactttgggaggccgaggtgggtggatcacctgaggtcaggagttcaagaccagcctggccacaatggtgaaaccctgtctctactaaaaatgcaaaaattagctgggagtggtggtggacacctgttatcccagctacttgtgagctgaagtaggagaattgcttgaacctgggaggcacaggttgcagcaagccgagatcaagccacagcactctagcccaggcgacacagactccatctcaaaaaaaaaaaaaaaaaaaaaaaaactcaagacagcagaggagagacgctgcaacatgaggactccagccacaatcagtcgtcagctgagcttttgcatcaaagcctgtctgcgaggcaggggtgtgcactggagccgctccactcacgtggacgggggctcagagacccggaaacagcattatgccccataataggggatcagtgatgtttgcataaaagagaaccaggtacaagcctgagaaggatggcttatgtggatattagttactgacatgaacctttgtcatcatacactgataagtgaaaaacagtatcacggtatacgttcaaagtggtgcatatgctagaataacattttctggagaaaatctcaaacctaattctatcgatccctcaaaatatgaaaggctgcatgccaaaggattaatagtgattccttctaggttgcaggaatgtggctactgtttgccaacatttttcttttttttgttgctataaatgttaattacttgtatcatcgctttaaaacataggccggtgcggtggctcatgcctgtaatcccagcacttacagtggatcatttgaggtcaggagtttgagaccagcgtggccgacatggtgaaaacccatctctactaacatataaaaatgagccaggcatggtggtgggtgcctgtaatctcagctacttgggaggctgagggaggagaatcacttgaacttgggaggcagaggttgcagtgagctgagatcgcactactgcactccagcctgggcaacagagcgagactccttctcaaaattaattaattaattaattaaaaaggaaaaatataataaggacacactccatggcttctgcagtctcttctgagctgatagtcaaggtcctggcatggcttggctctcctccagtgctgggttaggggctctgtgacccagtgccccaccctagcctggcctaactatatcctttgctgaccttgaaccccacacagatcctggcaaagctgcatggctccatgaatacatgtatgtacatgtaggagcttttcatgcactttctcacttaaactttccaaccacctagagagctcagctagagtacctcactttacagatgaagaaacaggccttggaaggtgaagcgactttctctgatgactggaaagtgtggagggaagtcctgcaccccgacctgcctgtatcaaagacttgtctctcacgcctcaagctctgtggttctgtgcacacctcaccaggcccccactcacccatctaacatgtgtttgttctgtgtgcatgtttttcttctgtgttctgggccacacctgttgggcacctctccctccccggcaagggggaagctttaggaagtagagagaaaggcagggcacagggcctggctctgaggaagggtcacacttacagccaggcctggggctggtggggtaggcagagggcacagggcacgtgggggagaggggggaccttcccaagacagggaactgtctcaaccataatcaccctcagtgttgctgcttccccgctttatgttctatagagacacccggaggggacagcctgctgtggtgggcactgtgctgggcccaggctgtgtgctgacagaaccctggggctgggctggggcaggaggcgagaccctggcttcctgctttgcttctcccgccacccgcttcttcctcctctcttcccttctccttccatcccatcttctccctgctgtcctttcatatgcttcctcttcccccttctttctcctcctcctcctctcccttcttcatttctagtccagctatagtgggaagaagtccctgcaaggagctctggctcttggccaagagggaaggagaacctgggacaggaaaggattcccagcaaagggttgcacactgggcaccccgagcccttgctgaacctcagctttggagcacaaggtggaattcaggtttgtcagcctccccagctcagcagggaaccagcagtctgcacaatgtgaccgttggtgacggatgttggcctctgcccatctggctgcattgctgtcaacatacaggttccatgtcccgggctttctgcccaggcactcccctgcaaagtgagccccaggagaaacccgggtttacagctgctctgtagccccaaaccctgtaccccactggctgacgctggctacccaaaaagaaattattgaggcacagaggatggcagcactcaatctcccgtgtggacgagcgtctctgcagtcatattattagcatctcgagggcagagcctgagttgccttcacctctgcaacttccttagcacccagcattaggagagcgacataagacacacctaaaaaatactggcactgacatgcaaacctaggtcttgtacgtcaagtttattaggagtgtaaaacttcttgtagtattccctctaacttagccaggtgggaaagtgtcaaataaaaaggacttcagtgggatttctgagtagcatccttggaatctgcactcaagggatgctactcggaaatcccactgaagtccttttaattaaatgtgtgtgcatgtgtgcaacccacatgtgtacacgtataccttgcccccaaaactggaatgccggatgagggccatttctgctgtacccactgcctctgccactcattagctgagtgtgaccttgagcccattatctaaccacacaaccagatgacaatctcatatgacagctggcttgctcactctcactctgctgctgcttttttctttttcttttcttttttcttttttgccatatagatgggggtcccactgtgttgcccaggctggtctcgaactcgtgggctcaagtgattcgcccaccttagcctcccaaattactgggattacagggatgagccaccacacctagcctctgttgcttcgttgttgaaaattgttgagatctagcgttccccatgggttaaactctccttatccatggactggagtgcacttatcatgggatctcaagtctaagtaatagaactatgactgcaagggtgagcaggcgctgcctcagaacaccccgcaatgctgtcatctcagaggctgggacacctgccccgtctgccgagctggggtttgctgtcctggacaccccgtgtatctgctgtgatctttattgacaagaaagaatcttgctttcttgacaagaatctgcactcaagagatactactcggaaatcccacttaagtcctttttattaaatgtgtgtgcatgcgtgcgacacatgtgtacacgtatacctttcccccaaactggaatgctggatgggggccatttctgctgtacccgccacctcgcatgctccattctttgcctctgaagccacccccaaagctcaaggcttctttccatctactactgagttggggtctggggagggcgacccccagcagccacagccgtgcacccctctatgtgaacttggcttagacaagtaagtaagaaagtaagtggatgtggtgatgtaagccctccctacttcccccgttctaggggacatcttgctggtgaaggcacagctgaccccagaagtactatccccgactcagaggacaggatgtgggggatttgacctaggccctgagacgcatggaaccagctacctggggagcaaagcaagtgccagggtttctggggcgctggccagggccagacgctaggtctgccatccgttgctcacccagtgcctggcacagtgcctagcccacaggagatttacaatagacaccggtggaatgaatgagcttggacaagatcagtaaacagaatcttaatttcctctcctataaacaggaaattagaggagcatctgctcctcttaccaatgtgttgtggggagcaaaggaggtcatctccgccgggcgcggtggctcacgcctgtaatcccagcactttgggaggccgaggcgggtggatcacaaggtcaggagatcgagagcatcctggctaacacggtgaaaccccgtctctactaaaaatacaaaaaattagctgggcgtggtggcgggcgcctgtagtcccagctactcgggaggctgaggcaggaggatggcgtgaacccgggaggcagagcttgcagtgagcccagatcgcaccactgcactccagcctgggggacagagcaagactctctctcaaaaaaaaaaaaaaaaggtcatctcaagtgaaactgatttgaatcccagctctgcccctttctagctgcgctacctcaggcaacctcttggagcctcagtttcctcatctgtacaatgggaggagctacaaaaccttcttcgagggagtggaagctcagtgtttggcatattaggcattcgctactattttcgtcatgcttatgaaagtactctgaaaactgcaaatgcttttcaaatatgaattactattttcttttttttttttttttttttttttttatgtccagggaatccatttcagagaaccaaatgtactttagggaaagagttcatacgataaacaaaactaacaataaccctcattgtccttattgagcgtctattaaatgccaggcattgtgccggcttcttcaaacacatcatgtcgtgaaagctatgggtcccctatcgctcctattttgtaggtgaggaaaccgaggcacagagaggttgagctacttctccaaagttacagaactaggaagcagggcagccaggattttgaagaccaggatcccaggccttctctcttgtgaacccaaggccctctgagatttatcggtgcatcctgggaagagctctcaatggacagcagttgtgggtgagtggggctttctagaaccatcctccactcggatggctcaggattctgctctgtctggctctgccctggagcactgttcctcattcactcttaccttatgtaactcagtgttcccgccccctgccccaaggattatataagg

SEQ ID NO: 247 - DNA, 42848 bp, Homo sapiens
  source 1..42848: mol_type = genomic DNA; note = NC_000001.11:c23913362-23870515 CNR2 [organism=Homo sapiens] [GeneID=1269] [chromosome=1]
ggcactcaacaggtgctctgagtggcacccacggccaggtcctgggagaggacagaaaacaactgggactcctcagcccccggcagctcccagtgcccagccacccacaacacaaccgtgagtagctttttttgttgtttattttaggcttcttcctcattccccaacacctgtattcttttttgtttgtttgtttgtttttgagacggagttttgctctgttgaccaggctaaagtacagtggcacaatctcggctcagtgcagcctcacaggttcaagcgattctcctgcctcagcctcccgtgtagttgggattacaggtgtgcactactgcgtctggctaatttttgtatttttagtagagacagggtttcaccatgttggccaggctggtctcgaactcccgacttcaggtgatctgcccaccttggcctcccaaagtgctgggattacaggcatgagccactgcacctggccaaaacctgtattcttaccttatcccttccctccagggacacaagaagccaggtgggcctgtctggggcaggggatagatgtcatttcaggacacctggggttgtggaggaccagtcgcaggaaagttcagggctggcatccccctcctaggaccaagaatcaggactttggctttcatttcattacagagacaagaatcacacacacagagatggccttactgtgtgccaggcgctgccctaagagcctttagtggttggatttatttaatcctcacaacagccgtatgcagtaggagctatcactgttgtccacttgataggtgggggctaggtgacccacctgaaatcatgcgggcattgaatgagagcattggcttgagcctaggcactccggcttcgcggcccacccttcagccaccaggctatcctgccttacgaggtgtggactgcaacagtagatgggggccaggaaatgacaggggctggcagaggcctttgagatgaccaggtgagtcctgcgctctcattttatagatggggagaccacaaggtagtgttaggggcacactggactcaggaggccaggggtctgctttggtgtaagttccactcagcggagggaagagcagtattttccagtgtgccctggggtcagcgtccaggtctgaatcccagctctgccactggtagctcgatggcctaatgcaaatcactccatttctttcctgctcagcttcctcttctgagaaacatgggcctgagaaggtcactcacaggcttgttgcgagtcaactgtctgatgcgggcacagggcgggcagcagcacagggctcgggaatggctgtggtggagagtttgatcttcaccccatctgctcttgctgtggatctgagatgaggataaaatgaggcctggctgcttttccctggaatgagtggcaagtagacacgttggcagcatgaaaaccaggatggaggctggggagaagttcagggagagctcaggaggtggagtcccaataatcctggccccagctctgtaaccaccttgtggcttaccagagtgaccccctaacctgcgctgggcaggtgaagcatatcctttaccctttggccggctaaggccaggataaggcagtgaagacgggaaaatggcagcctggctcagccaagcagagccctccagcgccagccccctctcttcccacctcattttacagtaccagtcactcttactgcacaccctcgggtgtgcataaattgatcttttctttattcagttgaagtcacattcaataggaccctgagcctcatcctactgggctaggaggaaatttaatctccaagtgcactgagcttccctcactcccatccccacccatgcacattgacccagaggacacacagaacataagcgtgagggaggctcctgggtcctcctacgatggatgcccattgcccaaatggacttgattgtctgaagtccagccttgcccacttccctggcatgcctggagtccagattctttgtaagacctgaaaccactgtgtctcattttgacatccaggatatatcacccagtgacttcccccagaggtcctgccatcttcccagaaagcaaattctaggtgcccaagacctcggtcccctcccagccaaggacaatctctcctctccccttggctgtggatggcagatggacactcttctctccccaccccccacccacgtgacctaaccttctcactgcgctcaggttctcaggaaaggacaggaagaagggttgtcttcaaatagcttctgcttcctactctcacccctgaaaaaagtccccgagccacgagacacaaagggcactctgaaaagagacaggcagccctatcttacagatgagaaaaaccaagactcagcagcagtgttgacttgctcagtgtcacacagccaaggaatagcggagccagtgtgagcagagagtcctgcgctgtgggttcagagcttgtgctatcaatcacatggaatcacatggaaacccaagtctccctcatcaattactcaggcaacctggggcaagttacatcacctttctgaacctcagtttcttcaactctaaaaatgacgctatcatagcattcccaacctgcctcaaaggggctcttgttttttgttttttgtttttttgttttgttttcttttcttttctttctttttttttttttttttttttttttgagacagcgttttgctcttgttgcccaggctggagtataatggcgtaatctcagctcattgcaacctctgcctcctgggttcaagcgattctcctgcctcagcctcccaagtagctgggatgacaggcatgcaccaccacgcccggctaattttgtatttttagtagggatggggtttctgcatgttggccaggctggtctcgagctcccgatctcaggtgatccgctcttgtttttttcttaagcgaagattgatgaagcatttactacacatttgagctctgtgaccgttcctcattaagtcctcaccacagcctaggagggggctgctatcactaaccacatttgcaaggtgagaaactgaagctcacacaagcttaagacttatccaaggggccgggcatggtggctcatacctgtaagcttggcactttgggaggcccaggcaggaggatagcttgagctcagcacttcaagaccagtctaggaaacatagtgagaccctatctctacaaaaaaaaaaaaaaaaaaattaaaaattagccaggcatggtggcacatgcctgtggtcccagctactcagggggctgaggtggaaggattgtttaagcctgggagattgaggctgcagtgagctattattgcctgggtaactgagcaagatactgtttcaaaaaaaaaaaaaagaaggagagagacttgtccacagtcccataactggtggtaatggcaaagctgagactcaagtccaggtcaatctggatccagaaccaagccatattgtggtgggaatcaaaataggagaacgggagtggaaatgcctctaggtatggagatgcagggcaggctcggggactcatgatcagggttgtctttactgtgtcgctcgccaggctgcgtttcagatgccatcacatggacaacccgagaacctgcgctggggaggaaattggagggatatcatatgaatatggccggcttctctcctcccaccccaaactgagcagtccaatccagtcttgtgaggtgtctactctgtgccaagaccctgaggctctagcccttggcccaggtgacttcctgtttccatgatgatctctgacagaccttccctgactgtgcttaggcattatcttatgtaatcctcacctcggtcctgtaaaggcaattctctttctctccccaagctataaatgaggacactgaagtctcgggagagggcagagtgggaacccacgcacagccaaggctctcggtccccagctatgctgcagggaccaccagaagagtaagatcaggtctcagccttcttccagcagaacccagaacagtgtaaaactgttctcttttccctccatctcctggggagagaaaggatgtactcagtcctcacgccatgcagcaaagacctcaaatgccaaggagagaaaatgacagacaaggccagattaatgggggaggaactgcatagtggagttagggccaagcagggagggaaggattccccagcaggcgagggagtgaaggctgctggggccccatccagtcggggaggatgtgggtgagcccatgagcagaggggacttcgtggttcggtgtccggtgagcttcacggcttctcctcccctcccccacctgcttccactgcccagagaggaggtctctgatctcctgctcatacagtgagtcaaaggcagcttttcccactccctcacccccaccaccccacctgtctctcagaggctcccttgcctccctagaggttgaggcaacccctaagttcctctttgagagccacagctgcgttcacagtgttgcctcagcccaaattcattgagttcgtcctctgtgtctctccctgggtctgtttgggtcctggaaaatctgatggagctggaagctggggaatagagcccactgagagcaaggaaggagccagagggtgcttcactgaccttctgtagccctccctcccttccaatgggcccatttgacagatgaagccactaaggctgagacacaacaggcagagacaggagtcaaacccaagtctgtcttcccactactttctaccagcttttcccactagggagggagatgttccagaaggttcacatcattagaaggtcttgatgcctgtttccatttttttaaaaattagtgaataattattgtaatagttaaaagattttttctcaatgtgagatcttcctaggataagtggaagaatcaaatctggcaggtatagccaggcatcgcttgagcccaggaattcaaggctgcagtgagccgagattgtgctactgcactctagcctgggtgacagagcaagatccctatctcaaaaataaaataaatatttaaaaagcgatagttggccaggcacggtggctcatgcctgtaatcccagcactttgggaggcccaggtgggcagatcatgaggtcaggatatcgagaccatgctggccaacatggtgaaaccccgtctctactaaaaatacaaaaattagccgggcatagtggcatgtgcctgtaatcccagctactcaggaggctgaggcaggagaattgcttgaaccagagagccggaggttgcagtgagccaagatcacgccactgcagcctggtaacagagggagactccatctcaaaaaaaaaaaaaaaaaaaaaaagcagtagttagtggtgatagaacaaactagctcatgactcacaaccaggcaattaatcattcagctacagctttggctgatatatggctttacatcgtttttgctcttaatctgatatcatttaatttatacccttactgagccaatgattaaagacagcataagaaactgatatcaaaaatacaaggaagctgggtacggtagctcacgcctgtaatctcagaactttgggaggctgaggtgggtggatcacttgaggccaggagtttgagaccagcctggccaacatggtgaaacctcatctctacttaaaaaatacaaaaattagccaggtgtggtggcacacgcctgtaatcccagctacttgggagtctgaggctggagaactgcttgaacccgggcggcagaggttgcagtgagccgagatcacgccactgcacttcagcccgggcaacaaagcaagactccacctcaaaaaaaagaaaagaaaatacaaggaaatgatggtgttaactcctctgcagatttgcttcaagattcttcttttttctcttgttttttttttttttttttgagacaaggtctccctctgtcaccaggctggagcatagtggcgcgatctcggctcactgcaacctccacgtcccaacctccacctcccaggttcaagcgattatcctgcctcagcctcccatgtagctgggattacaggtgcatgccacacgcccggctaatttttttgtatttttagtagagatagggtttcaccatgttggccaggctggtcccgaattcctgacctcaggtgatccgcccaccttgctctcctaaagtgctgggattacaggagtgtgccaccatgcccggcctgcttcaagattcataaattacatttatctgatcaactttcttatatggcatattagagaaatcctactacttcacaacatttcaaaggttggtaagaagagagaaagatgtattctgtcttttcctgtactgggtataaaagagatctacacctgcaaggcatatacagagaggcatgcaaataggggcctgagacatattttttcttttttttttttttgacacagagtctcactttgtcacccaggctggagtgcagtggtgcaatcatggctcactgcagccttgacctcctagattcaagtcatcctctcatctgagtctgtcaagtagctgagactacaggcacatgccaccactcccagctaaatgaaacctattttatcttatcatatagcaaacataaaattacttttaagaagtatgaattggccgggtgcggtggctcacgcctgtaatcccagcactttgggaagtgctgaagctcaaggtggatcacttgagctcaggagttcaagaccaacgtgggcaacgtggcaaaactccatctctaaaaaaaaaaaaagaaagaaaaaaaagaaagataggaaaacaaaaaaaaaaagttagagaaaaattttaaacaatacacttattgtaaatagtacattttatttaaaatcacttcctttttcatgggccatagaaaattatgaaatggctcgagtagtttccactggggtttgtaaaattaagttttctatgtcccatacatactgtttaatcctcacaacagtcctgagtggaggtattttcattattcccattttacagacaaggacagtggggctcaaggagacgacgtaatttgcacgagagaacacagctttaataaggggcaggaggtgggtacagtggtgtgggcctggagtcccactgctagagagtctgaggggggaagacagcttaagcctagttctccaaaaaacatcagagtgggagcagaatcagaatcacaactatgactcaggctgcctctgtctacctatttcctccttattctcagttggttccgagggtaagttcaggaccaactgagaatctgtgttcagaaccaactgagaatctcttttacacagaacaggaacaggaactagaaatccaggccaccttgcaagtttggctcccgaggcctgagattggcttgatagagtgtcccgtgatcccgctagatcccaaatcccaggccagagattgcaacatgtgttctttgttatggtcccagggaccaaaagccaacagatgcacaaatgcaccttaattaattctattagagagaggtagaaggaacttacaggaggatcagctccccagatgtctggcctatccctggctgttcctcgtctctccgtggcctgagtcctcatgccaggtttaattcatccatcagcctctgcccagcttgtccctttgtcccctccagcccctttgccaccactcacagatcttatcagccccatgagtcaagcctctctgctgatgctggtttccccaactacagaacaggagtgatactagtcccccatcatggatttgttgtgtagaatatataaattaatatataaatatatataatatataaagtgcaaagatggctgggcgcggtggctcatgcctgtaatcccagaactttgggaggccaaggcaggtggatcacctgaggtcaggagtttgagacaagcctggccaacatggtgaaaccccatctctactaaaaatacaaaagctagctggcgtggtgtcgggtacctgtaatcccagctacttgggaagctgaggcaagagaatcgattgaacccgggaggcggaggttgcagtgagccgagatgcactacactccagcctgggcaacagggccagactcatctcaaaaaaaaaaaaagaaagaaaagaaaagaaaagttaagtgcagagaatagtgcctgacacacggtatacagtaggtgcaatttcagtattagttgctactattgtcataatcaccagagtgtttcaagagctgagcctccatggctctccacatcgcttcacaaactcccctgttctgggaaccagcctgaattgcaacctcaacccccgactgatgcaaccctataagcaaaccagaatcatggctggggtaggggctctaccctttgggatctggccaaaccaggaagaggtagagtggcctggaggcaaaccacaggtgattcagaatgttcaccacgtggttaaccctgtcttactcctgctttagagagaagccaccatgaaaagtcctcatcatcaggggacagacctctctgttccctggttataatgccttactttgtatgaaagtttcctttcctacagagagcacttcatggacagaatgggtgactggccacttccaggtgtgattttaacaatgctcctcccacccccagacaaatgcatacttcccgatggctgacagatttcacagtaacaggctaccctcagggtgaaagagatccacacatgcttatcagtcatttatgctgtaatatcacagagcatcaaataattttctgtagtagactttctttgaaagagggagataggccttttagttcttgttataaaaatgaagattagctaggtgcagtggctcacacttgtaatcccagcacttggaagcagcaccaggccgatcacctgaggtcaggagttcgagaccagcctggccaacatggtgaagccttgtctctaataaaaatacaaaaaaattggctgggcatggtggcaggcgcctgtaatcccaagctactcgggaggctgagccggaagaatcacttgaacccgggaagcagaggttgtagtgagccgagatcgcaccactgcactccagcctgggtgacagagcgagactccaaaaaaaaaaaaaaaaacaatgaaacgaacaaaaaaaccagagttctgagtgacatcacctggatcacaaaggagctccctagtggggcaaagctaagattcctgtcttcaggcagtgtgaactctggaatctggtaaagcagaaaatcgggagcccaaatgcaattttttaacatttcaaagggccccccagaaagattagagagaagtccccgggagaaagccgcaggagccagctgagcaactaggaggcaggctcctgtgacagttgcagacctgggcacaggtttgggttcacatcgggctctgcccttttgtgcaacctcagacaagtcactgcatctttgcgcctccgtctccttgtctgcaaaacagagatgatgataataggaccacccttcctgacttactgtgaggattaattgcattttacacaactagctattgttaaagtgaagctccccacaatcccattttcacccttgcatttatggcctggcaggttaggttctgcaaggctgtttcacagatactatgaggagcacttttgatatgttaacctaggcatgcccttcttactgacgcacgttaaaaagaaatgcttttttttttttttttgacaaagcctggggtctcactctgtcacccaggctggagtgcagtggcacatcacggctagctgtagcttcaaccacctgggctcaagtggtcctcccacctcagcctcccaagtgcctgggaccacaggcatgaaccactacccctggctaatttttttttatttgtagaggcggggtcttcctatgttgcccaggcttgtcttgaactcctgggcccaaccgctcctcccacctcagcctcccaaattgctgggattacaggtgtgaatcactgcacccggcctcactttgaaaattagaaagcaggttaccctccttgaggatgctggcatgtgtcagagagaatacctccaaccaatccattaaaaagcagttattgctgcggccaggcctggcccggctgcgctaggctaggctctggcaggatcgcaggggcgggggtggtaggggcacgggtggcagccccgcgggtcgcagcgccgccgccgccgccgcccatgaatggtgctgcccctggcctgccatcaccgccgcgtcgctcagcgcccgacctccctgcttttgcttgcagagccgctcccgaggccccggcgcggcgcgagggcgcggggcgggggtccacaggctccgaggctgcccccgacgccccgccctcgaggatggcggcggagctctacgtccccgccagcgccgcggccgcggtcctagcccacagcaacgccggcgccgccgtgggcaggaaggccgggcagcgcagcctgcaccgcgcccccgcgcccgcgcccgcgcagcccacacttggcaacaaccacccggagagccccaaatggcgcggtcccccacgctgcgcgagaggaacgcgctcatgttcaacaacgagctcgtggccgacgtgcactttgtcgtgggacccccgggggcgaccaggacggtgcccgcccacaagtacgtcctggctgtctgcagctccgtcttctatgccatgttctactgggacctggcggaagtcaaatctgaaattcacattccagacgtggagcccgcagcctttctgatcctattaaagtacgtgtacagtgatgagatcgatctggaagcggatacggtgctggccactctgtaggctgctaagaagtacatcgtcccagcattggcaaaagcctgcgtcaactttctggggacaagtctgaaagccaagaacgcctgcgtcctgctgtcccagagccggctgtttgaggagcccgacctgacccagcgctgctgggaggtcatcgacgcacaggccgagatggccctgcggtcccaaggcttctgtgagatggaccggcagacgttggagatcattgtcactcgggaggccctcaacaccaggaggcggtggtcttcaaggccgtcctgaactgggccaaggcagagtgcaagaggcaggggctgccagtcaccccacgaaacaagaggcatgttttggggcgagccctctatctgatccgaattccaaccatgaccctagaggagtttgccaacggcgctgcccagtcagacatccagacatcctgactctggaggagacccacaccatcttcctgtggtacacggccaccaacaagccccgcctggacttccccctgatcaagaggaagggcctcaccccgcagaggtgccacctattccagtcttctgcctaccgcagcaaccaatgccagtactgcgggcgctgcgacagcatccagtttgcagtggacagaagggtatttattgcggggctaggcctgtgtgggtccagctctgggaaggctgagtacagcgtgaagattgagctcaagaggcttggggtagttctggctcagaatctgaccaaattcatgtcggacagatccagtaacaccttcccggtctggtttgaacacccggtccaggttgaacaagacaccttctacatggccagtgctgttctggacggcagcaacctcagctactttgggcaggaggggatgacgcaagtgcagtgcagaaaggtggccttccagttccagtgctcctcggacagcaccaacgggactggggtccagggtgggcagatccctgagctcatcttctatgcctgaggtgcccggggaggctgcagcaggtcggcgagtggatggaggggaaatcaggacactaactgcttcttgacaccatgaaaggccacacttaaccttgtctctctttggcatgtagtcaactgaagcttgattctgtgaagtaggcaccttttccacacagccagagctgggggattggagtcttaggcatctctggtacactggggtgcacgtctcaggtggaggaagatttagggcacaagacaggccccagatcccctcccaatggcacccatgccacctgctttgaggggttgcatgttcctgccaccctcttggatactaagtggttccaagcttaactgtagaccttcccttcaaatctaaaatcggcaaaaagtcacttaaaataagggacttctgtaataaaggttgcctacaattaaaaaaagaaagagttactgagcagtgaccatgggtgaggcaggtgcacttaagatacgggagtgaacaaaacaaataataagccttaactcccttggagcgaccattctagtgtcctattactcaaatcagtctcccccagcattcgaggatcagagattttaaggacaatttggttggtagctggaaacgtggctcggtaaaatggtccaaggtgggaaggataaaaatgagattagggaggccaggcacggtggcacatgcctgtaatctcagcactttgggaggccaaggcgggcggttcacctgaggttgggagttcaagaccagcctgatcaacatggagaaaccccatttctactaaaaatacaaacttggccaggcgtggtggcacatgcctgtaatcccagctacttgggaggctgaggcaagagaattgcttgaacctgggaggcggaggtttcagtgagccgagattgcaccattgcaccctagcctgggcaacaagagtgaaactgtctcaaaaaaaaaaaaaaaaaaaaagagatcagggaagagatggttgcccagaagtataagagagaccccatgcccctccgtctataagcctctaggggttcaccttgcctgccgcctagacagagccgattcatcaagacaggagaattgcaatagagaaagagtaatttatgcagagctggctgtgcgggagaccggaattttattattactcaaatcagtctccaccagcattcaaggatcagagtttttaaggacagtttgtttggttgcggggagccagtgagccaggagtgctgattggccagggatgaaatcacagggggtcgaagctgtcctcttgcgctgagtcagttcctgggtgggggccacaagatcacatgagccagtttatggatttgggtggtgccagctgatccatcaagtgcagggtctgcaaagtatctcaagcactgatcgcaggagcagtttagggagggtcagaatcttgtagcctccagctgcatgactcctaaaccttccttcctttctttctttcttttctttctttctttcctttctttctttctttcctttctttctctttcctttctttctctttctttctctttctttctttctctttctttctttctctttctttctttctctctctctctttccttccttccctctttctttcttttctttcttttttttcttttctttctttctttctgacagagacccctctgtcgcccaggctggagtgcagtgacgcaatctcagctcactgcaccctccaccttccaggttcaagtgattcttctgcctccccctctcgagtagctggtattacagcatgcaccaccacacctggctaacttttgtatttttagtggaggcggagtttcagcatgttggccaggctggtcttacctcctgaccgcaagtgatccacccgcctcagcctcccaaagtgctgggattacaggcgtgaactaccacaccagaccctaaaccataatttctaatcttgtgcctaatattagtcctacaaaggcaatctagtccccagccaagaaggaggtgtactttgggaaagggctgttattgtcttagttttaaactaagtttctcccaaagttagttcagcccaggaatgaacaaggacaccttggaggttagaagcaagatggagtcagttaagttagatctctttcacagtctcagtcataattttgcaaaggtggtttcacatctaggctgcccaacttctgtggtcagggtctggcaccagatatatgagtctgaattctgactctgccatttacaaactttgtgacctcggcaaatccagtctagctgagcctctggttcctcatagataagatcgtgaaaatgagacagtctatctccaagggcagtttggaggataaaggagacagcgcatttctttgtggtaacatttaaaatctactcttttagcaattttgatacgtgtatcataatatcacattgtattccataaatatatacaattattatttgtccatcaaaaatagaatgaaaacatttaaaaataatatatagtacgggccaggtgtggtggctcacgcctgttatcccagcactttggtaggtggaggtggttggatcacctgaggtcaggagttggagaccagcctggccaacatggtgaaaccccgtctctactaaaaatacaaaaattagctgggcatggtggtgcacatctgtaatcccagctactcaggaggctgaggcaggaaaatcacttgaacctgggaggcggagcttgcagtgagccaagatcgtgccactgcactccagcctgggcagcagagtgagactttgtctcaaaaaaaaaaaaaaaaaaaaaaaaaaaaattggccaggcgtggtggctcaagcctgaatcccagcactttgggaggctgaggcaggcggatcacaaggtcaggggatcgagaccatcctggttaactcggtgaaaccccgtctctactaaaaatgcaaaaaattagccgggcgtggtggtgggcgcctgtagtcccagctgcttgggaggctgaggcaggagaatggtgtgaacctggaaggcggagcttgcagtgagctgagatcataccactgcactccagcctgggcaacagaacaagactccatctcaaaaaaaaaaaaaaaaaaaaaaaagccgggcgcggtggctcacgcctgtaatcccagcactttgggaggctgaggcgggcggatcacaaggtcaggagatcaagaccatcctggctaacatggtgaaaccctgtgtctactaaaaatacaaaaaaataataaaaaaatagctaggcatggtggcgggtgcctgtagtcccagctacttgggaggctgaggcaggagaatggcgtgaacccaggaggcggagcttgcagtgagccaagatcgcaccactgcactccagcctgggtgacagagtgagactccatctcaaaaacaaacaaaaaataaaaataaaaataaatatatagtatggatttgaacaacaacagaaaaggacacagtgcttgtaaaaggcctttcacagtgcctgccacaaaggaagcactcaggagagagtggcaaatttattttcttcacatagttaaaccacaacaacatattgcaacagtttgcatgctgaagcagagataagaatccagctgccttctcataaaccagacaattaaagagatttgccacaaaaagttattttcatttaaaaatatgttacttcagggcgggcgtggtggctcatgcctgtaatcccagcactttgggaggctaaggcgggtggatcacaaggtcaggagttcaagaccagcctggccaacatagtgaaaccctgtctctactaaaaacacaaaaattagccaggtgtggtggtcccagctactcaggaggctgaggtggaagaattgcttgaaaccgggaggcagagtttgcattgaaccgagatcgcaccactgcactccagcttgggtgacagactgagactcggtctcaaaaaaaaaaattctattaacatgcaataggattattaattttttttaagttctcagttttagtctctaatacagcaagtactaataggtgtaacctacatcaacaaaagctatttattgccaaggtaacttttaagacggtaaagggtcgctgagaccacgaagtttgagaacttctgccccaggctttcgtgatctgcctttctctcgccagctcttttgcaatctgacaacacccctgttttctgccccatgtgattaattgcataactgccatgtttgaaggaccttttgagatctcatcaaaaaaccactcctggcagggtgcagtggctcacacctgtaattccagcactttgggaggctgaggcgggtggatcacctgaggtcaggagttcaaaaccagcctggccaaaatagtgaaaccccatctctactaaaaatagaaaaatggtggcaggcacctgtcatcccagctatttgggaggctgaggcaggaaaattgcttgaagctggaaggaggcagctgcagtgagctgagatctcgccactgtattccagcctccagcctaggtgacagagcaagactctagaagaaaaaaaaaaaaaaacactcctggtgcagatggacctactgagaaggaggctattgtgcctgaggttacacagccatcagttccacctgggactggaaccagcatccttcctatctccttaatccagggctctcgtcatgacggcaagctagcaggtgctccctggcacaatctcagcttcctgttctttcatctctaaaagtcttgagtggagacagggtcttccccctctgctttcctgtcccacccttccctcctgcctctcatctccctctttgacactcctcctaccagcccaagggcacaatagagatgacatcgtcactctcattggttaccaactagcaaagaacttgagaaagtgaggagaaagctctaatgtgttcacatatatagcatctatataagctgccattcatggagggcttagtgtgtggcaggcactgtattaggcctgagctaactcagttagtcttcatgcctccccaccactgatgagacaagtactacttgttactcctgttttatggatgagggaactgaatgaaagagatgaatgaagtgagtgtctttacttgagaacaaaaagctaatagtacttggcagagccaagatcggaactcagtgctatctgactccaaagcccaacagcctgatgggtaaatccttgtcggtgagaaggtccagactccaccagtaaggtggggaaaggactaaagtctagggcctggcagggtgtggtggctcatgcccgtaatctgagcatgaactttgggagaccaaggcgggaggatcacttaaggccaggagtttgagacaagcctgggtgatatagtgagaccccatctctacaaaaagtaaataataataacaataactcaaggccagctaatggtagcaatgaaggcattactgagaaaaaatggtcagaaaaataaaagtcaaaaagagagagaaaatagatgggatttgcccctggaaataaagacaaaagattgtgcgtggtatcagggcccctcaccctatgcagagtcatgcattccatcctgcctctttaccaatctgaccttgtcatgacacaaggacttaagtcctggccgggcacggtggctcacgctgtaatcccagcactttgggaggccgaggagggcggatcaagaggtcaagagatcaagaccatcctggccaatatgaaaccccgtctccactaaaaatacaaaaaattagttgagtgtggtggcgcgcacctgtactcccagctactcgggaggctgagggaggagaatctcttgaacccgggatttggaggttgcagtgagctgagatcacgccactgcactccagcctggtgatagagcgagactctgtctcaaaaaaagagagagaaaaaaaaggactcaggtcctggctttgtccgccacttgctatgggtttttgggcaaaggacttgccccctctgaatctatttgctcatggaatagttgagcaaaacctgcctcacataatagccgtgagccttcccaggctgtgtaaattgtcaagtatgttatgaatgtaagcattattagtccattctctaaaagagaagttgctgaattataaaataattgaaagaggaagaagatatttggaaagactcaacaaaactgtcctgttggcagatttcttttctttttttttctgagttttgctctgtcacccaggctggagcacagtggcgtgaccttggatcactgcaacctccacctcctgggttcaagcgattctcctgcctcagcctccaagtagctgggattataggcacacgccaccatgcctggttaatttttttgtatttttagtagagatggggttttgccatgttggccaggctggtctcaaactcctgacctcaggtgatccgcccacctcagcctcccaaagtgctaggattagaggtgtgagccaccatgcccggcagtgttgcagatttctaattagtcagttaatttaccaagtatttgtttggagatgggaggggagaatgcaaagcaactggatgggatcctagttttcaaataaatggacaagagagtggattcccaatgtccccagcaagtttctttttctttctttctttctttttttttttgagacaaaatttcactctgttgcccagggtggagtgcagtggcaggatcgtggctcactgcagcctctgcttcccaggttcaagtgattctcctgcctggctgatttttttattattattatttataatacagatggggtttcacggtgttggccaggctggtctcgaactcctgacctcaagtgctccaccatcttggcctcccaaagtgctgggattacaggtgtgagccactgtgcctggccaactttctttccctcccttccttccttccttcctagcttccttccttccttgcttccttccttccttccttccttttattaaaaaaattttttttttttgagacagagtttcacttttgttgcccaggctgcagtgcaatggcatgatctcagctcagtgcaacctccacctcccaagttcaagtgattctcctgcctcagccacccgagtagttaggattacaggcgagccacaacgcccagttacttttgtattttttactgtagagatgaagtttcaccatgttggtcaggctggtcttgaactcctgacctctggcgatccacccacctcggcctcccaaagtattgggattacaggcatgagccactgtgcccagtccctttttttttttttaatttgagacagggtctgctctgtcactcaggctagagtgcagtggtgtgatcacggctcactgcagcttcactctcctgggctccagcaatccaccacctcagcttcctgagtggctgggactacaggcacacaacaccatgcccagctaatttttgtattttttgtagagatggagtttcatgttacccgggctggtctctaagccctgggctcaagtgatctgcccacctcagcctcccaaagtgctgggactacaggtatgagccatggtacccagcccccagaaagtttcttaacattcctgagccccaatttcttcatctataaaatacagaaaataataagattcttgaagggttgttttgagatttaaatgagataatgtgtagaaagtgctagcacagtgccaagcactcatcgttatcccccaatcttctttacaaatggcaatactgggacaagagagagtaggtggcttctggatagatccagctggtgccagagccagggctcaaaccctgagcacctgagattccgaactcaggactgttttctttccaccacatccaacactcttgatagttcaatcaggcaaccaatctcctgcttaattagttttaaataattatttaatctgcacatacagaacatagggattagtttccccattcacagaggaagaaactgaagctcagagagtttgagtaactttccccaaggtcacacagcctatcagtggccgacctgagatttgaactcagtgatgtttccttctaaagccttggcacttaaccttgactaaagtggaaagaggcctcagacatcatttagctctgctctgcccaggagagaggctggagatgatgatgcagaaggaaggtccaggaaaggtctggggagactgagtgaatccagacagcctgggtgggggtgatgaatggtgagtggacagcaggctggggatggaatccttcggccccacagggaagactgagtttctttgataacccgtagacattagagaaagggactatagatagaagaccttaataacaatcctttgctcttaacctatacattacacattctttccttttatttttttgagacagagtctcgctctgtcgcccaggctgaagtgcaatggtgcgatctctgctcgctgcaacctccacctcacaggctcaagtgattctcctgcctcagcctcccaagtagctgggattacaggcacccaccactactcctggctaatttttgtagttttagtagagacagggtttcaccatgttggccaggctggtttctaactcctgacctcaaatgatccgcctgcctcggcctcccaaagtgctgggattacagcatgagccaccacccccagcctacacattctttccttaaaaagagtagaggtggctacattataaattggggcagttaaaataaaagcaaggcattagaaaccactaaaaggagcaataaataaatcaagaaccgaccttgaatggccctgtgactgcacttccacactgcattgagctctgggcttgctggcagccaagggaaaaagaagcacagaagtgggtctgaagaaggctgcttttctcctaatagacattcattgattctataaatccattttaaatacttagatgcttactttgtgccaggcttcatgccagttgaggtgctggaaaccccaggaggaatttattaaaggaattgactcaggaaacaactcctttgccagcccttttcatctctcctctaggaaagcttccatattttgccttatatcaataaacctcccctgggacctatatcactagagagattttaagttccttccctgcccagtgctgtcccacctccactgccaaacccattttaggagtgactgtcctggtggcctgttcacaaggtcaagagcctgggcaggcaccatccttctagttcacactctgcttcagggctgctgcttgtggttccaacctctttctgcaagtctggttctccgggccaggaacactagggtgagaaatatggtcaggctcaggaggcacaaggacttggagtggtgagaagtgtctgtcatgggcttgggattgaggagtgggagcttgaggccatcaaattgccttgcctggctgggctgagttccatctccccaagactgttttgctcagctctggctgctatcaaaagacctccaccaagagtctactgtggggataccattgtgctaggagacacttttttgagcaagtgagatacaaagatgactccactcccagacccagatattactcacaagacaaggagctcacaatccaggaagcaagatgtggaatggacacatataatacaaggtagacagtggtctgtgcagtaagactcaataaagggagaccagagaatgcttcttggaggaggtgggttttgctatcaaagtagttataaaaagaggtaagatttgggctttttttttttttttttttgagatggagttttgctcttgttgcccaggctggagtgcaatggcatgatctcggctcactgcaacctctgcctcccagattcaagcaattctcctgcctcagcctcccaagtagctgggattacaggcacccaccaccacacttggccaatttttgtatttttagtagaggtggggtttcaccatgttggccaggctggtctcgaactcctgaactcaggtgatctgcctgccttagcctcccaaagtgctgggattataggtgtgagccaccgtgcctggcctgatttggattttcagtataattcataggctcacacacacacacacacacacacacacacaaaagatttggtcaaaaaaccccacagtctacagccccaaatcccagaaaactttattacaactgcaatcaagggctacaaagaacagagggaggccagccaggagcagtggctcacgcctgtaatctcaacactttgggaggctgaggtgggcagatcacttgaagtcaggagttcgagaacaggctggccaacatggtgaaaccatgtgtccactaaaaatacaaaaaattatccaggtgtggtggctcacgcctataatcccagctacttgggtggctgaggcacaagaattgcttgaacctgggaagttgaggttgcagtgagctgagatcacaccactgcactccagcctgggcaacagaacaacaatctgtattcaaaaaaaaaaaaaagaagaagaagaccagagggggactaagagaagaaacgtggaaggaaagccccatggctgaacactgcagcaggggcccagccagctgggcagcaggtcaagagggtcactttgatctatttcttttttttttttttgagacagagtctcactcttgttgcccaggctggagtgcagtggcgcgatctcggctcactgcaaacttcgcctcccggattcaagcaattctcttgcctcagcctcccgagtagctgggattacaagagtgcaccaccacgcccggctaattttgtatttttagtagagatggggtttcaccatgttggccagtctggtctcaaactccggacctcaggtgatctgcctgcctcggcctcccaaagtgctgggattataagcgtgagccacctcgcccagcgggtctgtttctgatgggtcattcttgcaggttgaacaagttttccaaaatgtggtggtttgtcctcagtggtggcaaagtgtcagctgagagtaagtagggattgttctatctgccttggctctcaggcgaaggtcaggcatagctggaggacagaatccttttcttcttcttcttttcttttcttttcttttttttttttttttgagacaaggtctcactctgtagcccgggctagagcacagtggaacaatcactgcttactgcagccgtgacttcctgggctcaagtgattctcctgcctcagtctccccagtagctgggactacatacatgcaccatgcccagctaatttttgtattttttgtagagatggggttttaccatgttggccaggctattcctgggctcaaataatccacctgtctctgcctcccaaagtgctgggattacaggcagagcccccatgcctggcacagaatcctgtaagaacactataaactaactctattaagcatctcctgcctttgattagatacctactgtaaaccaggtacagtgacatgaatttggtaaacttgtatcattaatctgtataatcatgtgatatggatagtatttctcccagtttacaagtgaatgaaacagaggctcagagaggtgcagtaaggtgcccaaggtcacacatcctgaaagttgcagagctgaattttaatccaggaaggtctggttcccaaacctgtgacattgtgatccaacatgctaagtttcctcgaggagaccttgggaatcacctccatcaatccaactgctttgaagatgagaaaagaaaggcccggatggtcaggcaaggtggctcatgtctataatcccaacattttgggaggctgaggtggaaggactgcttgaggccaggagtttgagaccagcctgagcaatatagcaagacactatctatatttttttaatagaaatcaaagaaagaaaagaaaggccttagataggaaaagggacctgcctaaagtcactcagtagcaggacaaggactagaacctaggcttccctactcccagttggggataaaaacggtgaggcttgtggcatcaaatctcagcttcccactgtaggtgtggtagccacaggcagggtatcattctcttccttacctccagctctgagagatttaaacccagcagcaacgtgggaccagccgctactgtggcttctttcacttcacgctttcacttcaggttagaaaaacccccaggcacaccttttctgagcaggttctcaggtcccaagtttcccttcccagatgctcagtatgaaccaggctgtaggctgcagcccctaacaccagccccaccatggacgctccctatgtgaagtgccatatggtttctgaacagtggtatttttgttaggtgaagaaaggacttggtcatggtggttcacttttttctttttcttcttctttatttatttatttatttttttaaactgaatctagctttattgcccaggctggagtgcagtggcgcaatctcagctcactgcaacctctgcctcctgggttcaagtgattctcgtacttcagcctcccgaatagctgggattacaggcacctgcccccactcctggctaatttttgtatttttagtagacagggtttcaccgtgttggccaggctggtctcaaactcctgacctcaagtgatctgccctcctcggcctcccaaagtgctgggattacaggcgtgagccaccgcgcctggccttttttcttttttaatcaggcagcccagaataggttcagaaagactcccgcttctcttttactcttacatctgtacagcatcaggtcacaaaatgtttttgcatgcatcggtgattcttaatattcagaactctgctggcacactgataaaaagtgtgaatccttctaccccaaccaaaacatgcacagacataaagtcttaaatatgcctcgaaaggaccgatactcccatccaagcctacccatggacccagggtaagaagctatgatggaggtcatcagcccatttggcatctcaaggagaatggcataggtattgttactgtcattttacaaatgagaaaagaaaaggggctcagaatgttgaagggacttgcccaaagtcacctgatgagccatggtggaggtggaactagaacactcttcactgtggcaaacactaagtctgtctctgttgtgggaaattaaggaaccagagagaccgaacggagtgcaggaaagtgtctatttaaggtgtacactggctcagtggacatgtgtcctgaaagtctgagcccaggacaaagaaaacgagtcccctttaagcattttgaggtgggcattatgtgaagcaggaagcaggcttacaagagcaagaataaaggctgttgtgacacttttgcaacatgtcttacatctctgggaaaacttggtttgcagcttatgcttatttgtcttgtgaccttgcagctgtgcaggggagaaagaagcaggagtttaaggagcctacaaaatatgtggagggtagatatggttaatgtttcttgggacagacggttaattttttttttttaactttaacttcggggggctacttaaattttttttttagccttggttaatatagcaatttattttatgagcttttttaactattactataatttttactattattacttataccattattctgttattttcttaatttcctacttcatctctgtgctggatgttcagacacagtcttcaccctggaaaaaggccctgtctagaagccagagattctgactccaaaagggatttatagctgtccaaagggaagacagtgagctgggtttcccgttgctctgtgtgtcccattgtcagatgctggcttgttaagacctgcatccaaatgcctgaatttctttcccttatctactttggataataaccacacatgttggtggccatgccaggcctagatgagacctgaagccagcctccatcagccccagcatccctcttctaggctgaattctacatggggtgagccatttcctgactggaaggggttgttttccaagggaaacaagggaagagagtccctgggtggcaggtgatggggcagggggttcctagcagggttgcagggatcctcttagccccctgagctggaaactttcagaagtagccaagtggggatgtgggagctgagaaaggcttgcactgtctgtcactcactagtgaccagggtggagaggtgagctggcacctttttctgtctgagctcaggtgtgaccttgacaacactcaacaaaggttaccagcctggccaacatggcaaaaccctgtctcaattaaaaatacaaaaattaaccaggcatggtggcgtgcacctgtaattccagctacttgggaggctgaggcaggagaatcacttgaacccgggaggcacaagttgcagtgagccgagattgtgccactgcactctagcctgggcaacagagcaagactctgcctcaaaaacaaaaataaaaaacaaaaaaaacaaaaaaaccgcaaagggtgtctgtctccaacttctctgcatagggccatctctatgcctattgcactggagttttgccttgtgactcgggatatgtggataattgcagctctgctgctcatatgttgggtgaccttaggcaaattatatccccattcttggactgttttctggatggcaaaatgatggcgttggattagaagagaggtttttcaatctgttcctagaggaacctgggctgccttgaagaaaggacatagtgatatgaatccccctgcagtcaagatatggcttactccatgtagaatccaccctagaagagggatgttgggggtggcggtggctggctttgggcctcacctagccccggcatggccaccaacatgcgtggttattaaccaaagtaggtaagggcaggaaatatgggcatttggatgcaggtcttaacaagccaacgtcaggacgcacagagcaacaggaaacccagctccctgtcttccctttcgacagatagaaatccctttcggagtcagagcccctggcttctagacagggccgtatctacctgttttataaacaggggttatgcagattgcaagaagcacctatcctcttaaaaattttaaagtcgttgggttgtaataagaactgacatttattgagctcttataatgcaccaggcatattattctttttttttttttttttgaaatagagtctcgccctgtcacccaggctggagtgcagtggtgcaatcttggctcactgaaatctctgcctcccaggttcaagtgattctcctgcctcagcttcctgagttagctgggattacaggtgtgcgccaccacacccagctaatttttgtatttttagtagagacggtgtttcaccatgttggccaggttggtctcaaactcctgaccttgtgatctgcctgccttggtctcccagagtgctgggattacaggtgtgagccaccgtgcctggccacccccccgccgccaccctttttctttcctaggacagattctcgctatgtcgcccaggctgcagtacagtggcgcaatctcagctcactgcaacctccgcctcctgggttcaagtgattctcctgcctcagcttcctgagtagctgggattacaggcgcacgccaccacgcctggtcaatttttgtagttttagtagagacagtgtttcaccatgttggctgagctggtctcaaactcctgatctcgtgatccacctgcttcagcctcccagagtgctgggattacaggtgtgagccgccgcgcccggcccaggcatatcattcttagcaacctcacagagtaggtgaactaaccccatttgaagatgtgcctaagaataataataatcacaacagtggcaacaatgaacacttccatgtatgatagtaatttatttaaatactcagaaaaccccattttacagatgagaaatgagaagaccaaagcattaggtattttgaaagaggtcactgggtaggatttaaacctacatggtttgttcccatctccctcacactcatacttggggtctacagtattcaagacagcccctttccatccaagtgcatttcattaattaatagcttttttttttttttaaggagatggtggtctttctctgtcaaccaggctggagtgcagtagcatgaccatagctcactgcagcctccaactcccgggctcaagggatcctcccatttcaacctcccagaactccgtgattactggtgtgagccactgtacccagcctcagttaatagtttttgaggccgggcatggtggctcatgcctgtaaccccagcattttgggaggccgaggtgggtggatcacgaggtcaggagttcaagaccagcatggccaagatggtgaaaccccacctctactaaaaacacaaaaaattagccaggcacagtggcagacgcctgtgatcccagctactcgggaggctgaggccggagaaccgcttgaactcggaaggtggaggttgcagtgagttgagatcatgccactgcactccagcctgggcgacagagtgagactctatctcaaaaaaaaaaaaaattgtttttgagcacctgctatgcagcaagcattgtgctgagccactaaaggtccagaaataataaagccttagttctgacctcgaccagccgtgtggcctcagcccaatgctttaacattgccgaccttttattatctgtgaaatagcaataagcataactctaatatcatagagttgcggggattaaactagatggtcagctgggcatggtggctcacacttgtaatcccagcactttgggaggctgaatcgggtggatcatttgaggtcaggagttcgataccagcctggccaacatggtgaaaccccgtctctgctaaaaatacaaaaattagctaggtgtggtggtgtgtgcctgtaatcccagctacttgggaggctgaggcatgagaatcggttgaacccaggaggcagaggctgcagtgagccgagatcgcgccactacactccagcctggaatcccagcactttgggaggccaaggcgcgcagatcacttgaagccaggagttcgagaccagcctgaccaacaaccccgtctctactaaaaatacaaaaattagccaggcatggtggcaggtgcctgtaatcccagctactcgggaggctgaggcacaagaatcgctttaactcgggaggcagagtttgcagtgagccgagattgtgccactgcactccagcctgggcgacagagtgagactctgtctcaaaaaaaacaaaaacaaaaaaagacataaagatgtctatagagaggcacagatttttccttttgcctcaggcaaggctcggttttcaactccagtctggggaaaatccctccagattctctaaaatgttatattcctgcctgcaagttctcttcacttttatctactcataaatcctctaaactctccttaaggattaggctttacaagggattggcccaacactgtggggggtttttttgtttttgtttttttgttgtttgtttgttttttggagatggagtcttgctctgtcacccagactggagtgcagtggtgcaatctcagctcactgcaacctccgcctcccgggttcaagcgattctcctgcctcagcctcccaagtaggtgggactacaggcgcacaccaccatgcctggctaattttttgtattttagtagagacagggtttcaccgtgttgccaaggctggtcttgagctcctgagctcaggcaattcgcctgtttcggcctcccaaagtgctaggattacaagcatgagctaccacgcccggcctaacactgtttttaagattcatcattgttggcacgttttcaccactttgtggtattccttcgtatggctgtattacaacttatttatccattttccagttgatggacatttagaattgttcttctatttcaaaaatgccaaagagaacattcttgtacatgcctccctggacgcacctgcaggagttcctccagaacgtattcccgggactgcaattgatgtatcgtcaacttcaccagattttgccaagctgctcttcaaagtgtctgtgtcaacttacacccccatcgcaatgagagttcttttggctccacgccttctccagcactcagtattgtcagccttacttttttaccgatctgatgggagtgaaacacatttctctgtctactattgaggttacgcatcttttcaaaggattattgaccatttctctctcatgccctgtatttttcttcattgtggttgctctcctttttcctttagtaatcttgcctgtggtcatctattttataatcttttcaaacagccagctttgactttgtcagttctttctcttccctatagttttgccatgtcattaatttctgctcttattatttctgtcttctgctttctttgaatgtatgccatggcccttcttctaatttcatgagttgcatgatgagctcatgaggcttttttatcttgtagtatgagcgtttattattaatttatttattgagaacagagtctcgctctgttgtccaggctggagtgcagtggcacaatcttggttcactgaaacctccgcctcccaggttcaagcgattctcctgcctctgcctcccaagtagctgggattataggcaccagccatcatgcgggctaattttttttttttttttttttgtatttttagtagaggcggggtttcaccatgttggctaggctagtctgaaactcctgacctcaggtgatccacccgccttggcctcccaaagtgctgggattacaggtgtaagccaccgcacctgatagtatcagcatttagagctgtaaatttccctttgcatacgactcagatgaatctcacacattttaatgtctcacaatttcgtagtcattcaatgccaagtatcttctaatcgcctttatgaatttttgacccaggaattgttcaaaagtgtgtctttttttcttttttcacacatcagactggtaacgtgacaatgtcatcataggtttgaggaacatctcacacgtgagcgtgaaaaccagtcatcacgcttatgaactacgaagggatcccgaagtgtgtttttaaagatccatacctgaggccaggcacggtagctcatgcctataatcccagcactttggaaggccaaggtgggcagataacctgaggtcaagagttcgagaccagcctggccagtatggtgaaaccccatctctactaaaaatacaaaaaattagctggtcgtggtggcaggcacctgtaatcccagctacttgggaggctgaggcaggagaatcgcttgaacctgggaggtggaggttgcagtgagccaagactgctccactgcactccagcctgggcacaacagtgagactccatctcaagaaaaagatccatacctatgaactttgttagtaatttttttttttaaagacaaagtttcgctctcgttgcccaggctggagtgcaatggcacgatcttggctcaccgaaacctccgccttcccaagttcaagcgattctcctgcctcagcctcccgactagctggaatcacaggcaggcaccaccatgcccagctaattttttgtatttttagtagagacgaggtttcttcacgttggtcaggctgatctcgaactccctacctcaggtgatccgcccgcctcggcctccaaagggctgggattacaggtgtgagccaccatgcccggcctagcaattttttttttctttttttgagacagggtttcactctgttgcccaggctggagtgtagtgatgctcattgcagcctccgcctcctaggttcaaacgattctcctgcctcaaccacctcagtagctgggattacaggtgtgcaccaccaggcctggttaatttttgtatttttagtagagatggggtttattagagacaggctggtctcaaactcctggcctcatgtgatctgcccgcctcggcctctcaaagtgttgggattataggcatgagccaccatgcccaaccagtaattttttaaaattattattattacatatattttttgagacggagtctcactctgtcacccaggctggagtgcaatggtgtgattttggctcactgcaaactccgcctcctgggttcaagcgattctcctgcctcagcctcccgagtagctgggattacaggtgcctgccaccatgcccagctgatttttgtatttttagtagagatggagtttcaccatgttggccaggctggtctctaactcttgacctcaggtgatctgcccgccttggtctcccaaagtgctgggattacaggtgtaagccaccacgcccagccttaattattaatttctaaataaattttatgtggtcagaatacaattttatacaacagatcattttatattaatttatatttataattatatttaaattatatgtaatatgttaatttatatttaaattacatatataaactataggctgggtgtggtggctcacatctgtgatcccagcactttacgtgaggtcaggagtttgagaccagcctggccaacatggtgaaacgccatctctactaaaaatatatatattaaaaaaagccatgcctggtggcaggcacctgtaatcccagctactcaggaagctgaagcaggagaatcacttgaaccctggaggcggaggttgcaatgagccaagatcgcgccattgcactccagcctgggtgacaagagtgaaactccatctcaaaaaaataaaaactaaaaataatacattttatatattagaaggtgatagtggtatggaaaaaataaagacgaggtcagtgtaaagaaaagcaaaagagctggaggttgggctaggtgcagtggctcatgcctgtaatcccagcactttgggaggctaaggcgggcagatcacgaggtcagatcaagaccagcctgactaacacggtgaaaccccgtctctactaaaaatatgaaaacttagccgggcatggtagtatgcgcctgtagtcccagctactcgggaggctgaggcaagagaaaggcttcaacctgggaggcggaggttgcagtgagccgagattgtgccactgcactccagcctaggtgacagagtgagactccgtctcaaaaaaaaaagagttggaagttgggatgagttagggtattacatggggtagtcagggtaggtgtcattgaaaaagtaagatctgggcaaagacttaaacaaggtgagagcaagccaagtaaatgttgagggaaaggtgatccaggaaaagggaacagccagtgcaaaggacctgtggctgaagagaagactgattaagaagccaatgtggctaaagctgggtcaccaagggaatcatggtagaagggaccataacactaaggactttggcttttacatagtggactagggagctatgcagggtttgggacagagaaatgacaagatcctatatttttaaaggatcaccctgactgctatgttgaaactagattagaaatgggcctgattaaaagcagggggcccagttaggaagctattgcaataaaccagataagagatgatgcctggttttttttttaagcctaaaattaatcaatgtctttacccacttcctagataaagctttaactctattcatctctttcttgtcttgcatttttgtcattcacaattttatttctactttgtttttgtttttgtttgaaacaaggtctcattctgtcacccacactggagtgtggtggcacaatcatagatcactgcacactggaccacctgggctgaagtaatcctttgacctcagcctcccaggtaaatgggaatacaggcatatgtcaccacgcctggctaaatttttatgtcttgtagagatgggtttcaccatgttgcttaggctggtcttgaactcctgggctcaagcaatcctcctgccttggactcccaaagtgccaggatttcaggcatgagccactgtgcccagtctccactttggttttgtttgtttgttttgttttgttttttgaaacagagtctcactctgtcacccaggctggagtgcagtggcatgatctcggctcactgcaacctctgcctcccaggttcaagcaattctcctgcctcagtctcctgagtagctgggactacaggtgcacaccaccacgcctggctaatttttgtgtttttagtaaagatgggcataaattactcactattatcattgttgttttataaagccatttgcttttctttactcatatttgtcaacttacttgctcactattctttcttgccgttcttttcttccctttgggttgaatttccttctaaaatgcacattctttagatgttccttcagtgaaagtctgttagtgaacaattttctttgaattttttagacctcattcttgaatgatagtttagctgggtataaaattctagactgacagttttttctttattttttggcttctattgttgctgatcagaaatctgctcttaaaattaattatggttctcttacaggtaatttggcttttcattcttactgccttatatttttctttgtctttggtattctgatatgtatgctatatgatatacatgaacatggaatgtgtttttaaaaattctacttggggctgggtgtggtggctcacgcctataatcccagcactttgggaggccgaggtgggcatatcacctgaggccaggagttcaagcccagcctggccaacatggaaaaccccttttctactaaaaatacaaaaattagctgggcatggtggtgcacacctgtagtctcagctatgtcaggaggctgaagctggagaatcacttgaacctgggaactctgtctcaaaaaaaaaaaaattctgctttgggttccctgtgatttccaaatctgaatagtcttatttttcatggatcctgaataattcttttttgttgttgaggcagggtctcattctgttgcccaggctgcagtgcaatggcatgatcatggctcactgaagccttggcctccctgggctcaagtgatcctcccacctcagcctcccaagtagctgagacaataggcatgcaccaccatccagctaatttttgtatttttttgtagagatggggttttcccatgttgcccaggctggatggataattctttactactacctctttgactattgcccaccaccagttttctctgtttatcctctctaacactcctctgagatataaacatttttactcaatccttcataactcttaacttctctttcttgttttccatcactttatctctttgttctgcattgtgagaaatttcttcagagctacattcttttttttttttttgagatggagtttcactcttatcgcccaggctgctgtgcagtggtgcgatctcagctcactgcaatctttgcatccggggttcaagcgattctcctgcctcagcctcctgagtagctggcattacaggtgtccaccatcgtgcccggctaatttttgtatttttagtagagacagggtttcatcatgttagccaggctagtcttgaactcctgacctcaggtgatccatcacttcagcctcccaaaatgttgggattacaggcgtgagccactgtgcccagccccagatctactttctttttttttctttttattttttttgagatggagtcttgctctgttgcccaggctggagtgcagtggcgccatctcggctctcggctcactgcaagctccgcctcccgggttcacgccattctcctgcctcagcctcctgagtagctgagactacaggcacctgccaccatgcccagctaattttttgtatttttagtagagacgaggtttcaccgtgttagccaggatggtctcaatctcctgacctcatgatccacccaccttgacctcccaaagtgctgggattacaggcgtgagccaccgtgcccggccaccagatctacgttctagatcaatgcttttcagttgttctgttttgctctttaactcatcccttaaggatctcttttttcaatgattttatttttgacttccagaaattctacttgaatctttttcagatctacccagaaacaatctctcattctgtactcatgtttttaattctttattgtttttatatcagactttttttttaaggtatacccaagaattatatgaagttattgaaagtggaattctactgtctgacgtttctgctgactcttgctcatgtttccttatgcattttgcattgtgaactcaaatttcacgggcctttatatgtggtattcctatacaacctgtttagaaagtgaatcgctccaaataaatgtttagtttgctttctaataatgtctaataataaaccgtacaatatctaggttcctgagggttttttcttcaatatttgtgacatatactaaaaagttacttcttattgacattcatcttttttttttttttttttttgagacagagtcttgctctgtcgcccaggctggagtgcaatggcacagtctcggctcactgcaacctctgcctcctgggttcaagcaattctcctgcctcagcatcccaagtagctgggactacaggcacgtgccatcacgcccagctaattttttgtatttttagtagagacggggtttcaccatgttaaccaggatgttctcgatctcctgacctcatgatccgccttccttagcctccccaagtgttgggattacaggcgtgaaccaccgtgcccagccaacattcaaatttaactggactcctatattttatctagtataaaatgttttggccaggcgcagtggctcatgcctgtaattccagcactttaggaggctgaggtgggtggatcacctcagatcaggagttcgagaccagctggccaacatggtgaaacccggtctctactaaaagtacaaaaattagccaggtgtggtgggtgcctgtagtcccagctacttgggaggctgaggcaggagaatctcttgtgcctgggaggcagaggttacagtgagccgagatcacaccactgcactccagcctgggcaacagagcaagactttgtctcaaaaataaataaataaataaataaataaaaattaaaataaaataaattgtttaatcttctgtactttctcttcccatcacttgatgttaagccaaattcataaatcccatccccaaatagttgttaaaacttcagtactttacttgccgaaattggcaaattaacaaaacaaaatgtaaaacaaacaaaaaaaccctcaaccttatcactctagattccatttcttcttggttttgatttcctcttggttttgaccttttgggatttcccttgcttcaaaaggaagtcttaggattagtcttttggaaaatggaaggccaaaaatctcacaagtcacttctgcttgttgcattcccacgtacctcccctgaggcagccaggacagatctggcttcctgcttggatggagaaagggcaaaatacaggcaaacaaaacagaaactgattttcccacatagaatccatccatacaggtagcagttttggctacagtcagttatcaggtgaggtcattcttgtgcttactgaaaaagattattttcttcttctcattgtactgcagcaaagccttctagacaagctcagtggaatctgaagggcccaccccatggaggaatgctgggtgacagagatagccaatggctccaaggatggcttggattccaaccctatgaaggattacatgatcctgagtggtccccagaagacagctgttgctgtgttgtgcactcttctgggcctgctaagtgccctggagaacgtggctgtgctctatctgatcctgtcctcccaccaactccgccggaagccctcatacctgttcattggcagcttggctggggctgacttcctggccagtgtggtctttgcatgcagctttgtgaatttccatgttttccatggtgtggattccaaggctgtcttcctgctgaagattggcagcgtgactatgaccttcacagcctctgtgggtagcctcctgctgaccgccattgaccgatacctctgcctgcgctatccaccttcctacaaagctctgctcacccgtggaagggcactggtgaccctgggcatcatgtgggtcctctcagcactagtctcctacctgcccctcatgggatggacttgctgtcccaggccctgctctgagcttttcccactgatccccaatgactacctgctgagctggctcctgttcatcgccttcctcttttccggaatcatctacacctatgggcatgttctctggaaggcccatcagcatgtggccagcttgtctggccaccaggacaggcaggtgccaggaatggcccgaatgaggctggatgtgaggttggccaagaccctagggctagtgttggctgtgctcctcatctgttggttcccagtgctggccctcatggcccacagcctggccactacgctcagtgaccaggtcaagaaggcctttgctttctgctccatgctgtgcctcatcaactccatggtcaaccctgtcatctatgctctacggagtggagagatccgctcctctgcccatcactgcctggctcactggaagaagtgtgtgaggggccttgggtcagaggcaaaagaagaagccccgagatcctcagtcaccgagacagaggctgatgggaaaatcactccgtggccagattccagagatctagacctctctgattgctgatgaggcctcttcccaatttaaacaactcaagtcagaaatcagttcactccctggaagagagagaggggtcttggcactctcttcttacttaaaccagtcccagacacctagacacggacccctttttgctgatgagtgttgggactgactcctggaagacagcctggccttgcccacctgcacacagtctgttggataggtagggccacgaggagtagccaggtaggcgagacacaaaaggcctgggacagggtcagtacaagtcaggtcaggcttcatgcctgcatcctccagagaccacaggagccaaagcgagcctccaggcccagcaatgagggacttgggagaaatctgagaagaatgggttgttctcttgggaagtcagggtatcagatgggatggacatccaggtcttctctctgcctaattgtcaaggcctccttggctctggagctatgaaaggccccactttcaagtcacccttgccactgaggaccgaggactatgctatgatgaggattaaggtgttgacttgcctctttcagagataaatgacaagccttcagtttggggcatcctgttgtttgggcgaggaccctctctgatattctgataatccccacctgtaacctcaggtccctggaaatacagaggaggctgggatcgcctgagacacaaaaatctttggagaattttcttgaccctctgaagtccttccagcagcagtcctggtggtgctgctggaagcaggcaatgtcctagtctaacctaactcgaagaaaaaaaggaagatattcacaaagattgtataaatctccaaactgttcccctatctgcccccaattcagctcccttgcctcctccacacccctattacatataataagcagagcaagtgggaggaggggaaatgtccttcctatatgccaggtatggggctgacatttcagtctattgaccccagctagaatatagctccatgattttaaagatctcaggggccaggcatggtagctcatgcctgtaatcccagcactttgggaggccaaggcaggtggatcacctgaggtcaggagtttgagaccagcctgaccaatatggtgaaaccctgtctctactaaaaatacaaaaattagcagggcatggtggcaggcacctgtagtcccagctactcgggaggctgagacaggagaattgcttgaaccctggaggcagaggttgcagtgagccgagattgcaccactgcactccagcctgggtgacagagcaagactgtctcaaaaaaataaaataaaatagatcccagggtactcatttttcatatgagggaggctgggttcctcccagaggagcctaaaacagccaacaagagaaattgttggcggcaggaagattgcagaggaattctaatgcaattatttgggacctcaaatggaataaaatgaaagatattggttaaacatgtcttcgtttaatactttcaagacaaaatatccactagctattcacttattcattcatctcataaacatgagccaggctctgtgcagggtcctgagtacccagccataaatgagactgtgcccctgtctcatggggcttacagtctatatcctgcttgcaagacagccaataagtcaataaagaagataattacaggcagtacaacaaaggaaatatgcaggttcatgtcatgtaatagggattaattgagttaactcaataaacggtaggatagacctaccatgtgccggctcacttttattgagcctttactatgtgccaggcagggggctaagtgtttttaaatgccttatttcacttcatgtttcccaacaacctaataagaaggtcttagttatcttcattttacagatgtggcaacctcaaagatgcaaagtcacttgtctaaggtcaccctgctaagtaccagagctgaggtctccaacctagttctgtttgacttcaaagcctgccctcttaaccactaaccttttgtcctagttcagtcaaattctgcttgattattgctcattagggataatattagctatctgtagcatcagattgctgcaaagttaactcatcgtagattctcaatatactccattttattaaatggccccgtattaatctcctgtaataaatttcacaaatccagtggcttatcaacagaaatttactgtctcataattctggaggccagaagtcaaaatcaagatgtggtagggccctgctccctccaaaagtttaaggggagaattattccttgactctttcaacttctggcagtccctgtcattccttggcttgtggaaacatcactcctacctctgactctgtcttcatatggcatttcctctgtgtctcttggtgtcttttttttttttttttttttttttgagacggaatctcattctgttgtccaggcaggagtgcagtgacatgatcttggctcactgcaacctccacctctcaggttcaagtgattctcctgcctcagcctcccaaatagctgggactacaggcacccgccaccacactcagctaatttttgtatttttagtagagatggggtttcaccatcttgcccaggctggtcttgaactcctgacctcaagtgatccgcccaccttggcctcctaaattgctgggattacagacgtgagccaccatacccggcctggtgtcttttttaaagaatatcagtcactggatttgggcccaccctaatcctaatagtatgacttcatcttaatttaaccaattatatctgtagagaccctgtttccaaataaggtcacattcacagattccaggtggacaagaagtttaggcggacactattcaactcagtacagacccaggaacaaagtccacccactgggctgtgttgagtggcagtcactagtttatcctccctcaacaagatgagctccaggttgacctctgcatccccagtgctcagtcaggacccagcagagcatctgaagggatctggtcaatatgtgtggaactgaactgtttctgaaaagctctgacgtatgttttggaaaatcaaatcttgttttaatccagacaccaatctttttgtaaggcaaacaagtagcataaatgtttaaaagtgaatttgcatgtttatatactgtcattccttaaagttgaagcatgcctttctttattcatcggtggaatcctttctcattttggcaaagaaaatgcccaagtgcctggcacaaacaagcactgagtaaatacttcttgaatgaataaaactagattctaaaaatcatttgatcaaacgcaactccacactttctacttctcttcttttagaaccacactgtatttctgctttttttttttttttttttttttttgacatagaatctcactctgtcacccaggttggagtgcagtggcatgcaatcttggctcactgcaacctctgcctcctgggttcaagcagttctcctgccttagcctcccatgtagctgggattacaggtacccgccaccatgcccagctaatttttgtattgttagtagagatggaatttcaccatattggccaggctggtcttgaactcctgacttcaagtgatccacccaccttagcctcccaaagtgctaggattacaggtgtgagccaccactcccagcccctatgtctgctttaagtggagaagcagagcttatgagggaggagaacaagggtgcaaaagggacctagatatcactgagaactgcccttgttgtttggttgaggaaatgggcccagacagtggacaagacttgctcagggagacaaacgagatggtgtccagtgcaacaaacctaggtttcctaacttccagttctgtccactctacatcagtgcctctcacctgtccctgcaggttcacattttggttatgtggataaggagaaataaattgaagatcacaatgtcccattttatcttccccaagacaagctctgtaacattaaagaccactatgcaaaccgattactagaaaa

SEQ ID NO: 248 - DNA, 215034 bp, Homo sapiens
  source 1..215034: mol_type = genomic DNA; note = NC_000003.12:c186362234-186147201 DGKG [organism=Homo sapiens] [GeneID=1608] [chromosome=3]
gcagtgccgtagtagcgggccacggagatagacagctttggagctgctgaactccgagcacagggtgaagaccccggcgctaccaaccacagcctggcagcctggtctccgcggcacccactggggctgcatccccctcccccgagagggctgcgcaggcgggaagacgcccagaggccagcttcggtcccccttctgtctctcggttcctctttcctcccaagtaagggaataaaccgcgaagaaggagcgccccgggccaccgcgcaaccaagtgttgcctggtgaggtaagacggcggccggcgcggcggagggggtccccggctcagggagcacccggtgcagcaacttggtaaaggagggcaaagcgggagccggtcccgcggccagggaaggggctgcagccaaagccacggcgcccaccccgacagttccacctgccacaaagccctgcaggaagggatgccccgctcgaggggtgcaggcttggggaacgcacagggtggggctcggctctctctgcgactgagaggccccctcaagcctcaaagctgtgcgggtgggaggcggccttgctccaggcagtttgctaaagcaactggtcggatttccttcttcttctggacttaaccttggctccttgatatccagttcgcgctccaggcagtccgagaagcaggagatgcttttcctaatgtctggccgccaaagcctccgaccgtcccgcggggttctaggactttgggggcactccacaaagcccctgcgcagggcgacttaaagggaagctgaagcgaacacggacacctcagagaataaaggagggaagggtcgaatctgaggttgatctgtgtagtctcagagtcacaagatgtgtccgtgtgtgtgcttgtgtcctgaggagtgcgtacccggagtcacctgtggtgctttcgcagactccaccggtccacctccccttgcctagtctgagattttcttcgtttgaactagtggaatagaattaggggagggggctgtggagttctaaaaagccctacaggtgatttgacgtgctgcccccatccccaccatcactgcagtggaaagcttgggactagagctagaaccacctcccagatgggagggatgagctgcggaactcagggtggcggtcgagacccctcccccagtcgccccccgcggcgggagcgtctgctgcagcgcgaagcgatctgtggctgcgccgcagtggtgcccgggagcgctgtgaacccgtgggcgcgctctcccgcgctgcgccgctgcctcctcggacttcattagcatacgatgacctctctgtggggaggagggcctgggagggctgtttgtcattcctttattttgggggcttggcgacgacactttggatctggaggtgaacaccaggggtcatgatgagagacagtggtcaggacacaggactggaaacgacccctctggtctggatgggggaatcaactttgttattttggtgcttgggattctctgtctgtaaaatacagctggcagagccacttgctggcacacagggcaccctggttgtcaatgaaggaaattagatcatagagggcaaatgtcgaggtttggtcatgaacccaggcacagacacacacccctttatattttatgtccctctcactctcattccaggcatgtgtctaacatgggaaggtacttaactgtttgtcatattaaaagactacatttgctggagattccattccgaatatgaattatactccttaaataaaacggctgcaactaagccaacttcccggtcgtactcctgatctatgtcttttttgccaatcacccttaacgtttacacccagcactataggcattactacaggtatttttctgggaggggctttagggtgggaagctagtagatgagtctttcctaccttagaattttatggagtggttggttcagatcaaccgagacatggggagaaaacgacaaacatcagcgtgtcttgaaatctagactctcagagatgggagtaactactaagatcatctgttccagctcccccaactgctccaactccccacacaacaccatcaacagatggtgaggatccctccaacccggacactcccagaggcccaggctgtgcatgtgtgagcctctgcgaggaaagaacccagaagccagcaactctcccctctcctactgatgggagttggtggatgctggccccatctcctcccctggaagagaagggggaaaagggcggggaagtaccttttctttgtggtaaaactttaaaacttttaaaatgtatatcttattgtattacatcattataatgtactcttttagtataaaagtaattcatgttcattgcctaaaaattgggaagttgaaaagtatgcaaagaacaaatcaatcacccatgatcctaccactcccatcccacactgttaatatactggcatatttcctttccatctgtttttatgcctcgaaattatacaatccatagagagccagcatttattgggtgcctaataagtatactttgcatggtgttaaattttatattcattatatcctttaatcctcaggagtccctctgaggtgttattactatcaatcccatttttctagggttgcatttttctagggttctaagacttcaggtgacttgcccaagttacatagctagtatgtggcagaatcaagattcaaacccaggctgtctgactcaaaagtatggttgctgagcccctgtagctattggttctctgcttttttctgaattagtgttgtagcaaaagaccttcatgaacattgttttcctggctgcatattattacactgttagttatttaagttgcttcctgtctttagcaactacaaataactctgggcaaagtctttactgcacacacttcccattacttcctttggatagatgcctagaaatagatcaccaggccaaagggcatgaatgttttaaggctcacagtatatatgagaagccacttttcaaaaagggtacactaatttaggattccattcaccagaaacaactcggccatagttcaagcagatgacctttaggaatccaaataggccaaggcctcacacgaccaagccacatcacacgagcattcttcagtctcatggaagaaggaatcacacatatcaccttgctttatacactcgggagggattatggaaaccatacaacataaagctatacctatttttatgtgagcaagtatcagctgcagaattctctagctaaatgtcacatactaactttgaacaaatcaaaccatcatgtaaaatatacaaatgtgtataatgtcccacttctccatacaagtcattataacaacattcactcttgtgaacgtgcatcatgatcacagccaggttcagcaagcttaacccatcagcaacagcttcctcacatactggccatattcaaagagttgtttatttgtaccaagtatcagaattccacacccaaccatagtgagagctgatgtcactttataagtaacagagtttgtctgactaaaaaaaaaaaagaaatcaaggctagtaactattaatagtaataaaacaatttaaaaataaagttatacccatcatttaaaaaaaatgtcctcaggtggaaacaaaatgtggctggcagaagagagattgaattaggcaatacaaaacacacacacacacacacaaagggttagaagaaaacaaactggccctagctatgagttgttcctagagcctcgttgatctccaagccacctctgccaccagcagtgggtttagtagccctggaatataatctgttgttgctcccactctgagatcaatttatgcaagattcagctcaggtccggaaacatccttcagggaagcccaccctagagatgtcctgaatccacagcacctgtgcgtaagcttacctcgctatggcgaagtcactatttgcatatctcccactgaactatgagccccctgaaggcagagaccatgtctaatccttttctgtatccccagcacctgagatagtgccaatccatagtcaacaattaaatgtgacgaatgaacgaataagagaattttccaggtcctgtactggatgctttacgtgcatttctctttcagcatacctttattctgctcaggctagtcagtcccagaaatatacctgaaaggtgtctagagctgtgctgtctgttttcacatgtgactatttcctgtttaactttagttcattaaaattaaatgaaatttaaaattcagttcctcggtcacaccagtcacattgctagtgcttacatgcagcatgtgatttctggctatcatattggagaatgcacatttaaaagatttccatcattgcaaaaagtttaactggactgtgctacagtgtaagcttggtgcaagcaaagtgtgtgtctatgtctgtctcgttttccactgtatcctctgcactagcacagtgcctagccccgaagagatgagggagagaaagataaaggagggatggtggtagtaaatgttgtggtaatattagcaatagcacttactgggcaccgactctgagtcccacattgggctatgttctgtgcacgcatagcttcacctgatattcacatcactacactcctggtattaaccccatctcacagataaggaaactgagtctcagaaagtttcagtaatttgcctatggtcacaaagctgataggagagactgagattgaaactcaggtctatatgatttcaaagccttttctctttatttatcttctctttttttcttggaccttttgctttactgcctcaataactgctgtgtgttgtgatgtggattaggattgccaccatcttggcttcctgggaaatcacagaaaggggacttttgaaagctttccaagagaaacaatgggtataatttatgactctgaatcacatatcaagagtgcaaaattttgctcagggtcttaagagaacctgtccctggatgggtgaaggagggagaaaggaacccatccatagtgtggcctgacctgatttcagcgtgtcttgaaatctagactctcagagatgggagtaactactaagatcatctgttccagctcccccaactgctccaactccccacacaacaccatcaacagatggcgaggatccctccaacctggacactcccagaggcccaggctgtgcatgcatgagcctctgcgaggaaagaacccagaagccagcaactctcccctctcctactgatgggagttggtggatgctggccccatctcctcccctggaagagaagggggaaaagggcggggaaccaaaaacctacaagagcagaccagtcaaccaccatagtctgtgcttctcctcagggagtcctgaaccagctcttaagatctcgcaacctattaatggggtaacttggctctcaaatccctggccaacgcccttttcactgctccaccctacctcatgggccatttgctccagtgccctcactattattatcatcactcttgtcctagttttctctaatttctttattcttaaagaataaagtgcaaaatttcaagggagtcctaatcagcatggagaagactgaaattaccacctcctcattctatttcctatttctattaaaactctttaaggtctaattaagaatctataccattgacacctgttgagcttaatatcaactgaagtaacccaattctcttttaaacttgctcttgaactgcattgcccacctgctcgccttcacccgatacttgcccacaccccctcacagccactctagagactgtgcattgtttctcattttatcttgttcagttcagtctgcctcgccaacttgcccagatatttctggctgtgattctagcatccagtgtatttaccggccctctcagccagcttcctgccatctctgaatctgatgagcacgacctcttcatctaagtcatcaataaaaataatgaacactatgggattctgaggcattccactgtatgttccctaaacatagatattaattcaataattaaacagcacttacttagaaaatttattcagctttctgtactataactgagcccatatttcttcatctttttcaacattattagaagaatcttatcaaaggtctctgataaactccaaatattcttcatcactggtatttccttgatcttccgtccaataatcttgtcaaagaagcaattttgttggtctgacataaactaatttcagtgattccatgctggttccttgaaatcacagcttcaatcctaaaagctcattccacatcccattccagaatgttccctggaattaacatcagtccctcaaattaagacatttttataaattttcccattttaaaaagtagaactttatttctcatgaaggtgatggtagtggtggtgatgatggtggtaatggtggtggtgatgctggtggtaggacagtgatgctggtgctggtgctggtgctggtgatggtgataatggggtaatgatggtagtggtaggacagtgatgctggtggtggtgctggtgatagtggtggcagtagtaggggtgattattgtggtggtggtagtggtggggtgatggtggtgggggtaatggtggtaaggtggtggtggtggtgatagtggtgatggtggtagtggcagtggaggtgatggtggtggtggtgatagtggtgatggtagtggttgtgggggttatgataatggtggtgatgatcatagtggtgggagtagtgttcatggtggtggtggtggtggtgatagtggtgatggtagtggtggtggtggtgatgatcatggtggtaggagtagtgttgttggtggtggtgatagtggtgatggtagtggtggtggggggtgacaataatggtggtgatgatgatcgtgctggtggtagtggtgttggtgttggtggtagcggtgatggtagttgtgtggggagttgacgatagtggtgttggtggtggtattgatggtggtggtgatagttgtgggggtgatggtggtgataatgataatggtggttgggggcagggtgatgatggagatagtagtggcttccttaactctatgattctgaacaaattaaggagcatggtctaattacctcaattgcacactgtctcagcaccctgggatgttattcaattaggattagagatatatattaatttggggcagatctaagaatttctggcgtcatagaaaatgagatcagagaaggagccaagagaacatctggttctaagccttcatcctgagaaataaggaaacccccaacataataagtgccctgcctggggttacccagccagaataggagccagggtctcaccactctgaccagtgccttctccagggcataactcctcttttcacttccttttctgaagaagcttaaggctttatttcctgcaaaaatatctatttctcctcttggaattcgcttcttaagtcattgatgcttcagtgaaagttaaagattctttcctggaatcatgatgtgtaagagaaaagaaggaaagagcttaagagctctcattttccaagtgaaaaatggaggcatctagaaaagtctgctgtggcaagaaaagggatggaagagaaaaactcaatggccagacagcagctgacaaaacccagacttgcctgcccagttaatcatttgggtccatcactcctttctgtgtgttttgcgttggaagttttcttctcgccttgggaataaacagtgtcgtctgcagagaaaccaagttttcactttgctgatggctgatctggtgtgaaagttccaagtagccaaaggtcagtgaggccactttgatccttagatgctgaaatacttgaaatgtttttggcctaaatgtttccatttcctgctgcatttctccacccctctgctctgggaacagtggctcatagtacttcaccagctccgtcgtgcccctgacttgcagttaaagtaaataagctagagaaagctctttccagctcccagaaggccagggtgtcccttccttggaagccacacaaaatggttactctcatctagccccccaaactccccatccaaaagtctcatcaacaaggatgttcctgatccccagaacctgacataaagatattcactggtggaagtcagtctcttcccttttctcatgccggcatgtccagcaggcctggatgatcacaaagtgatctttctcaactattaggaagctagtagccatatgttcctataggggaaaaagtcccatggtgccccaaagaccacaccattctttaatccctaaatgatgcaaaccatagcaatgctctcctgaggatgctccatcgtttaaccaatattcaatcagtaaatatgtgctgagcacccacttcatgctagtcataggactcatttcttgggataggatcaactgggtttccaggagctgagtggaacagagtccactgttatatagatatagatatagatatagatatagatatagatatagatatagacatagacatagatatagatatagatatagatagagagtctatatatatgtgtatgtgtgtgtgtgtatatatatatatatatatatatatacatacataaaagtatatataaaagtgtgtatatatacttttttttttgagatgggatctcactctgtcacccaggctgaagtgcagtgctgtgatcttggctcactgtaacctctgcgtcccaggttcaaggaattctcctgcctcaacctctcgagtagctgggattacagatgcatgccaccacatctggctaatttttgtgtttttaatagagatggggtttcaccatgttcaggctggtctcgaactcctgacctcagatgatccaccctcctaacctctcaaagggctgggattacaggaatgagccaccatgcccagccagagtcaatctttagatgagagtcaggaaagggtcacgtcctcggcctgggaaggtattggacctaggaaatcaggtaatacgctctggagtagatgagcttgaactgaaatttaaaggatgcgtgaagttaagtgaaggaatgagggtaataaattctaggtaaagggaaccatgtatgcaaagccagtttttgttgtctacacttcagtgttgctggagcaaaaactgtgagtcagaaagttatgggagatgagtctggaaatgtggacaggagctgggccatggagggtctcgtttgtcacattaaagtgtgcattttttttcttgtagctagtgatgaggggaggggcactgagaactcataagtggggactgacgtggccacattttaacattagagcaacccctcaggctgctgtcttagaaggagagaagatggaaagtgaggctgcccctgagaggcttttgagggagttccagggagatgagggctaaaccaatggcagtacaggtggagtcagggacagaaccaggaaagaacttgtaactgagtgtatgtgagggggctgagggaggcagagaagccaaaggtggccaccaggctcctacacctgggaagatagtggtttcattgaccaagagaattgaggaacaggagcaggtgtggggttaggtaacaagttcagttcagggcacgttaactttgaggtttcagtgagagatccagatggagatgtaattggatagatgagctccgtggctggaggcccagataacgaagtcctcagtgcaagtggtgggtgaaacgtgaaaactcatgagatcaggggagagtctatttccatgtatctagatcaatgtattgccagtacctgaaagatccatgtcaaggaggtccatgcctatctaataagggaaagaaacatctcacagcattgagagtctgggcttggcaactgagctgtcccagtagccgtctattgactcagaccaatgtccacttctgccaggtgaatggtcaagcaggggggtggcttacagaaacacttatgcccatcttccatattagagctcacaaatttgtaagcatggtctttctctctaagctagtggttctcaagtctgtttaacattaacattgcctggggggagtggggaggggccttgaaaaagcaccagttgtgggtcccactcccagagatgcttacttaattggtctggggtcaaagcttgggcctcagtacttttttacgtctcccagtgctaccaactatgccaatgttcagaagagttaagaaccattgctaaacaaaacattcagcgatttctcaaattacagagcttttaattccttagctcctctggtaaatctcctacatgtgcattacagtttctctaaaactactttaaggtgtcagaaccgaaactggatctgcaccagtcatggtcttgcttgcgtgttgtccctgtttttgtattcaatgggtatttctccatcatgcctgcaaggctcatgaaaactttgtcaagtctcctgcacttacatccactgtctaccacatttccctgagttatataactaatgtacctgtcaagaagatgtaagaatcacctgccatgacttcttggtgaaccttggttagttccaagggatcattcccttctcttttaactgctcacgagtcaccactgaacccagtagttctctaattttcatttgcattagaacttcctagagatttcttttgtaatgaaacgtggatcctaaggctctctcctcagagactctgagccagaggtgtgggaagggggcctcgaaccagtatttttaaccagtagttagggtaattatggtgcagggataccactttcaaaaaataaggccttaaaaatggaaaatgaagcctacacatttaactcttaccttccatgatttttactgaaataaccaaattaatataaaaatatttgggaatatttgttatagtactgacaactagcaaaggacaccaatataatccacatgtcagacgttctgaaaacattccataataaagagtgttcacaacagtgattgagggaaagaccaaccaactgtaagtcatcagaatggaaggaaaagttggcctggagattaaatgaaaaggactcctagaagaattccactaacatctccaaaggtaaagcatcagagactgcacagaatggaataaatgtttgaaaaccgcatatctgaaaaagaattaaagtccagaatatatagagaactcccaaaactaaacaacagcaacaaaaaaacccaattcaaaaattgataaagaacttgaaagacatttctcaaaaaaggatatgtgaatagcaataagcacatgaaaagctcagcatcatgaatcatcagggaactgtaagtcaaaaacacaatgagatgccacttcatacccattaggatagctattatgtatattttttaaaagaacagaaaataacaagtgttggcaaggatgtagagcaattggaactcttgtacactgctgatgggaatgtgaagtggtacagccactatggaaaacagcacagtgggtcctcaaaaacttgaaaatagaatcactgtatgatccagtaatcacacatctgggtatatactccccaaaattgaaagcaggaacatgaagaggtacttgtacatccatgtttataacagcattcttcacaatagctaagagataaaagcaacccaaatgttcccttatggatgactggataaacaaaatgtggtaaatgtatacaatgaaatattactcagccttaaatgtgaatgaaattctgacacatactgcaacatgcaaccttgaaaacattacactaaatgaaataatccagtcacaaaagaaaaaatactgcacattccactcatatgaggtacttatagtagttaaattcattgagatagaaagtaaaatgatagctgccagggtgtggtggtgggaaagatgggtagttatcatttaatgccacagttcattttgcaagatgaaaaagttctgtggaaggctgagcatggtggctcatgcctataatcccagcacttttggaggccgatgcagatggatcaccagaggtcaggagttcgagaccagcctggccaacatgatgaagtcccatctctacttaaaaaaactacacaaaaattagccaggcatggtggcacacatcggtatcccagctactcgggaggctgaggcatgagaatcgcttgaacctggatgacagaggttgcagtgagccatgattatgccactgcactctagcctgggcaagagagtgagaccctatctcaaaaaaaaaaaaaggttctgtggatggatggtggcaatggttgcacaacaatgtaactgtacttaatgacactgaactgtacgcttaaaagtggttaaatggtaacttttatgttatgcatattttaccatgtaaaaaaactttaaaaagtggcaagagctacaggaatgctaggtaggcaggcaatgggaaacacatctcaatcaaacgtatccaatggcccctcagatgtgccttgtgctggggccatgggactcactctttgtgaagctcatgaaaacaatatctagcagttccaaagaagggagacatctaagaatgcaaagctaatgtcactctttaaaatagatgctaaaaaaaagagagaacataaacttaaaaatctccaagttatatttatagagatttaagaggatatagcaggaactatcaacatggagcaatctgaaagagagcaatctgagattgtgaaactttgcctgctttgaaatgaaaaatattttgcagaattaaaatcatgcagtggaagcacaaacattggaacaatgcagaaagctaaagatgagcatgaattctcacaattctgacaaaaaacatgaaagtgaaataatgaggggaaaacggaggctattattcaatacattaaacatataaatacagaatttttcaggaaaagaaaaaatagaagatgttataataaaaatataggtagctgaggcaggaggattgcttaagcccagaaggtcaaggctgtagtgagccaagatcgtgacatggcactccagcctgagtgacagagcgagacctgtctctaatttttttttttaatttaatttaccgtgacacatgtgtacctatgtaacaaacctgcctattctccacatgtatcccagaacttaaatttaaataatttttaaataaaaaaaaatttcctgacattacttcaaaatagttaatgtgtaccaggaaaaattaaaagtatattctggtgaaaattattaattataagaaaaaatctgttggtatgaaaacagaaaaacaatgttttattttcagagaaaaaataagcaagtgtcagacattgtgcaacactaaatatcagaaataagttgaggtatgactgtggaatttgggggtagtaagataatgaaccaaccggtgccgtggctcatgcctataaatcaagcacttggggaggccaaggcaggcagtcacttgagcccaggagtttgagaccagcctggccaacatggcaaaaccccacctctactaaaaatacaaaaattagccaggaatggtgatgttcacctggagtcccagctacttgggaggctgaggtggaaggatcacctgagcccaagaggtgcagactgcagtgagccgtgatcacagcactgcactccagcctgaacaacagtgagaccctatctcaaaaaaaaaaaaaaaaaaaagattatgagccagaattctctattcagtaatttgtacagaaaaaaaaaagctattctcagacaaggaaaaaaaaaaaaaaaaaagcacccagcaagtaggccactaaaatcctttattaaaaaatgtatttactcaaactattctggtcaacagagaaattaacattaaagcttgggaatggaaaagatgtgatatcaaagctgtggcgtgaataataaacccacacaaacatagacttagtatttacatgttattaatatagtcaggaaacaatgcaactgccaaaattactctcaacaaagaagatacataagaaacttaatgataataatgtggggctaaaaactcagattactcaaggcaaaaaaccttgatgtgctgaatgtctcattttgtgctgtgggaaacattgaatattgtttcattgctgaacacagaaaaatacaggtttaaatacatttttaaataagaagacagtagatgaatataaaactagaaataccatgcttaacttcaaaattaggaggaagatttggaacattatagccaagaatgaaaactaaaaaagggctgggtgcggaggctcatgcctgtaatcccagcgcttcaggaggccaaggtgggtggatcacttgaggtcaggagtttgagaccagcctggctgacatggtgaaacctggtctctactaaaaatacaaaaattagcctagcgtggtggtgggcatctataatcccagctactcaggaggctgaggcaggagaacacttgaacccaggaggcagatgttgcagtgagccaagattgtgccactgcacttccagcttgagcaacacggtgagactctgcctcaaaaaaagaaaagaaaaaaaatacgtaaaaaaggaaatagcaaggaaacattaatataaaaagtataaaataagatgatagaagccaggtcaaacataccacattaagtgtgaatggtttaatcatttccttttttttttttttttttttttgagactgagtctcactctgtcgcccaggctggagtgcagcggctgtggtctcggctcactgcaacctctgcctcccgggttcaagcaattctcctgcctcagcctcccaagtagctaggactgcaggcgcgtgccaccatgcctggctaattttttgtatttttagtagagacagggtttcaccgtgttagccagagtggtctcgatctcctgacctcgtgatccgcccgcctcggcctcccaaagtgctaggattacgggggtgagccgccccgcctggccaatcatttctattaaaagacaaagaaccacgcattggtcaaaacccaattctaaatatatgctgttttaaacaaaatgggagagaaagggataaaaaatgaagggacatagatatatcaggaaaatgcaaacaaaaagaaaggagggtgatattagtattaaactatagctaaaagtaaaatttaatacaaaaatcattaaatgatacaataaaattgtcaaaacacaattgcagagggaaaatctaacatacatctgtcaatctgcaacaaattgagtgccaaaaacaaattagtgtataaaagttttaaggctataaggagcttgatggaatggacatatatgggactttacatttaagaaatgaaaaaatctattaaaatgtttatgaaatattgagatattttgatcccatcgtaaaaaaattatgatacatttcaaaaaatgtagaacttgttctggcagtaagaggcaaataaaactgagtatagtatagtatagtatagtatagcatagttactctaggataatctattcttgaaatttgatgtaggtctaagacctgtgtacatccactcaccattattgatttcagcattcagtgagaacaagaccaaaaagacctgttgtttgacaagcaccaagtttatagaatgcttccttctttaagaatgaataaagagtaaaacatataggaattaaaggaaatgtaaaataagggagtaaataatagcatatgaaatgaaaatgagttactccagctgggcctaaaagaatattttagtagactagaatcctcataagagggcactagagggcatggtctttacaaatcaaaagacaataagaataaagctgagatgaaaatgaaaaatggtattcaaagatgtgaatgaaatatggacggactgcaaggaaattgaagcacaacagcagaattaaaattcactagctgcaattaatgagcagagtattctatcaaaagtcaaaccaagcatgtgaaggaagtgacagtgtaaaagataggcaactagtactgaagcaaattaaaaaagacatctaactaataatttgtacatcaagttttaaaactgtatacaaggtgaggggcagtggctcagcctgtaatcccagcactttgggaggccgaggcaggtggatcatgaggtcaggagttcaagactagcctggccaagatggtgaaaccccatcgctattaaaaatacaaaaattagccaggcgtggtggcgggcacctgtaatcccagctactcaggaggctgaggcagagaattgcttgaactcatgaggcggaggttgcagtgagctgagatcgcgccactgcactccagcctgggcgacagagcgagactcggtctcaaaaacaaaacaaaacaaaactatatgcaaaagtaaaatatattcaaacagtagatatgcattgatacaaaaaatcctgagaaaaatttgggcctaaaaccccagataataattttcaaagcctgaaaagactggtgtttgtctgaaaggataagacagtgaaaataaaatattctgaattccttggttcaattatgagactgtcatttcattcctgacacttaaatttagaagacaatagttacagagttttcaataacccaccttctgaatcaagggggtctaagaaaacaaactctatgcagcaaactaaatattaattaaacaaaggagacagtaaggaagcattaaaatgataataaaatagagcatgaaaatgaagacaccaaacaactcagttataacaattaacataagtaagctaaatcactcatttttaataaaagtcttcatattggatcaaaaatgaaaattcagctctatgttgtttaccataggaacccttaaaacaaagtgttgtgcaaaaattaaaacactgagaaaaggtatagcagggagatgccacaaaaactaaagcagaagtcattttattgatataagacaatgcaattcatgacaaatatcattaaataatacaatgaggattgttttctataagtgaagaatcaaattcacagtgaagatataatggccatggaaatatgtacatcaattaatattgcaccccaaactgatggaaacacggtagaggtggaagatatcaaaacaccactctcaggctttcacatatcaagtaaacaaacaaaacataatataaatacaggaattgtgtaatataatgaatactactgaaaaaattatatgctgcgtaatatccaaagcacataataaaatttattttctagggctcgtagaacatttataaaaattaattttgcatcaggttatacataaaacctcagcaggttcctcaaagcaaaaatagtaaaagtcatagtttctgttagaaatgaattttattgacttatttattttttaacttttattttaggttcagggatatatgtgcaggtttgttaggtaggtaaacttgtgtcatggggggttgttgtacagattatttcatcacccaggtattaagcccagtacccaatagttatctttcctgctcatctccttcctcccaccctccccactcaagtagaatccgtgtctgttgtttccttctttgtgttcataagttctttaagttcttatcatttagctcccacttgtaagtgagaacatgtagcatttggttttctgttcctgcgttactttgctaagtatccatccatgttcctgcatccatgttcctgcaaaagacatatcgcgttctttttatcactgtatatattccatggtgtatatgtaccacattttctttatccaatctgtcactgatgagcatttatgctcattccatgtctttgctattgtgaatagtgctgcagtgaacatttgcacacatgtgtctttatggtcaaatgaattctattcctctgggtacatacccagtaatgggattgctgggtccaatggtagttctgcttttagctctttgaagaatctgcatactgctttccacaatggttgaactaatttacactcccaacaacagtgtttaagtattcccttttctccacaaccttactagcatctgttttggtttttttgaactttttaataataaccattctgactggtgtgagatggcatctcattgtggttttgagttgcaagagatggattttaaagataaacaacagcagagggaactgtcaataaattatgtctatttacacaataaaatactaggtaaccagggaaaacagtattgttttgctggtattgaggaatgtttagtaacaccaaataatgctcaccatatactgctaagtgaaaaaaagacaaaaagagctaaaacaaatttgaaatttttttttaaagagatgcctacatatatatggatacattctagaaagaatttacagcaaaatgttaattgtcattatagttggataatgagatgatatgtgatttttattttaaaatcatttaaaaatatgatttggattcttagctaagactagtatcatgctcacgctgttgatagtttgtggaatatattttcttccacttttttgataataaaaataagatagtccaggtgcagtggctcacacataatcccagcactttgggaggcaggcagattgcttgaggtcaggaaattgagaccagcctgggcaacatggtgaaatcccgtctctaccaaaaatacaaaaaaattagcaaggcatggtggtgcgcatctgtggtcctggctactcaggaggctgaggtgggaggatcacttcaccccgtgaggcagaagttgcagtgagccaagactgcgctactgcactccagcctggatgacagagtgagactttgtctccaaaaaaaaagaaaagaaagaaagaagattagatttgcttgtttctggtcctctggcttcttgttgttgtttttctccaaaattcttcaaagatcaacgaaagtggttcagtagcctccatggaggttctggtaatcctcgttcacaagcgatagactaagctgttctttgctcttatgggtctaaaatgaactggcccagttcccagaattcctccaactttttttggcccatagtggggttttttgttgttattgtcatttagtatttcagatcactttcagctatttttttcacattataatttttccgtttaagtttgtgccatcttcctatatgttccttggttgtgtgcctttcttttcctttttttctaagtgtctttttcagatgggaatctgtgggtgagcctgcaggcacattttttaaaaggaccatttcttttccctttttattggaatgatttttgaacgcttccccattttggaaaacttcaggctgcctctattccagaatctcatctaatcataactatcttctttttaactttttagactgcctaaatctagacttcttggctacttattacagccagccttctcctcattgacaatcatgtcttctgagctggagtggcttgtttctcctaatatgtctcttctgcttgcttcaccaagcagggtctttctgttggtcagaatgagggaccgagagaaaaaaaacagaaataaaacaaaacaaaaaatcaaataaaaaaataaagaatgagagacagaggagtgtatctagttaagcttctttattccatgtcaacaagggaaatgaagagacttgtctgatgcgctatttttagctgaaaagggcgttttgcaagtgttcagtcagcacaagaccactttcactgctgtaacttcccttatgacagaataacagtggctaagaatccaccctccatttcttcctgtggccaagcggcctgtagaaaatgctcataatgaactcacatgtgttctttaccatattctgctcactcatgatatctctaggtgctctatccttagggtcgtgaatttccgtaacaaatcaatctcttgctgtctagactattcagcccattaatgtagtttctagtatttttttttattatactttaagttttagggtacatgtgcacattgtgcaggttagttacatacgtatacatgtgccatgctggtgcactgcacccactaactcgtcatctagcattaggtatatctcccagtgctatccctcctcactcctcccaccccacaacagtccccagagtgtgatattacccttcctgtgtccatgtgtcctcattgttcaattcccacctatgagtgagaatatggggtgtttggttttttgttcttgcgatagtttactgagaatgatgttttccaatttcatccatgtccctacaaaggacatgaactcatcattttttatggctgcatagtattccatggtgtatatgtgccacattttcttaatccagtctatcattgttggacatttgggttggttccaagtctttgctattgtgaataatgctgcagtaaacatacgtgtgcatgtgtctttatatcaaacaaatttacaagaaaaaaacaaacaaccccatcaaaaagtgggcgaaggacatgaacagacacttctctagtattctttataattatgtatacatatgtgtacgtgtcaccaggtaccttccctctcttgtctttgttttaccagcagttcctggatagattcatggtatcatggtatcatcccaactcttttatattttattttatttctgagttggtggtttcactatattgcccaggttggtcttgaacttcttggctcaagccatcttccttcctcagcctcccaagtagctaggactacagttgtgtaccactgcatctggctctatcccagctctttgatcctcttactcatcaccctgtactaaatacatgtcccccatgcttagtagatgcaagtccttcatgaccagacatgaacttacccttccagcatatgataaatcatggtccagaaatctacagccacttagtgatatctgcttctttgttatcccagaatcccaatgatcagcagaaagaacaatgacaacattatccctattcccaagtccttcacagtctcgcccctcaaactagtgggagatccagttagcctaggagataaagtaccttgaatacttggaaaaggcactgaacacaaactgatagtttagttcttgacctggaaaataattgaagcttgtggttttcggtagtctcatgtgcagaacagactaaaatgagtgagaagatagttatgagaccagagacctgctagggccattaagaagcccctacccagaaactggaggtgctgttacaaggaatttaatggagagaaaggggcagagctgaaagataaaagacaaaacttggcgaattgatgtctgatttggtattgagatttcagagaggggaaggagactaaaggtaaataaagccaatgtatcaagcccaggaaatgtggagaatgacttcttcattgaaaaagttagttgtttagttttggagatagacgtgggaggaaggtaagtttgagagtagagtatttatatatttaaaagttacatctagcaagtggttagaggaatgaatatgtgcatgtgattccatcagcaacagggtggctttctgaccaaactaaactcagcatgtgatttcacactctgatcaaaacaatgtcagtcaatcaaataaaatgatttatttttctttagttggggctggtttctgttggctatttttgcctagttcaaagtgactcacccagggagccagtccctccaattgggttgtaatttattaaacacattcagccaaatgactaactctgtgctcttctcccaacccctccagtgttattagtctggcccacacatccagccactcctaacccctgcaagcagatgtttccataaagtttatagttttttaaatttacttattcattaacagcttctagagatgaaggtgaaaatttacaatgttttgtcttctacagctggtactgaaaagcatcttctttccctcccatcctcttcctcgaagatttttcatctctaaattcatactttctctcattttaaaccacttctccattttatgaggacactcaaggggtcagggaatcttggcacatttacctgtgtctgataaagaggaagggaagggaattaacatctgtggagacctgtgccaggcacggccctgggaaacctatattcattatctttaatcctactgtgtaaggtgataccactattcccattttccagatgaggaaacttgggctcaagagattaggtagaataaatagtatgctcaagaccacaaatataggaaatgtcatggaggacatgctgactcaggtttgttggagcttggggtgatactcttttctgtttcctggcagatatagatttccgggtactgctgacactttgtgctccacatcagaagccagtggtacaaaggagcagcagagaaaccttcaatatctcacaggccccagcgtacaggcctcttggcataccacccacccccacaacccacacacatgcttcagtaagctgggctcattattttggaagatttgggggaaatgaaatagcacattcctaattagtttgaactgaggaacccattagctgtattttttattgaaattgaaaatacaaaaacataatctcatagcatgaaaaaacctcttttaaagttacatccaatttaggagtcttgaggttttgattttagtagttcctctctccggtggaggcatgtaagacacagttagtaaacaggagtcttttctgctctttcttctcagtcaaccatgtcaacatcatcgctgtctgagctcttctttctctgagctccacagcccttagcacacacagctcagtactatagcttttatggaagctctgtgatatccccaatgggctttaagttcactgatggctaaggtaatcctaattcatctttgcctcccccatagctcctagcagagtattttaaacatactaaaagcttgataaatgcacaagcataattgcccattgaacatcattattttaaccaactttataggaaaggataaactaactagaagatagaacaggatttcaaggtagaataagtcctctataatttctggtgtaggggaactttaggtgaaggtgattcatttatttaacaatggtatacattcatgcatcgttcacagatactaaaattctcatgtatataaataatactcataaagaatgaaaagacataatacatattgtttatcctataagcccacatacattacacatgttcatacatagtatacattgatatgttccatgcagtaactgcttgggtatctgccttcaagtcaatgttccgtaagcctccatctctaaccaatgtacgtaaactttgaaaagattgagttgtgccagaaaaaaatagaaagaagcagacctagatagtagaaataaggactttccttcaaatttttaaaaagtataaataatacattaatacattccctttttaaaaaagaattaaaaagttacagataacaaaacctcaacttctaaactttatgtatttcttggaagtaaccatgattacatttcatgtacatcctttcacatctctcttttttcagttacataagaatatttgtaccactacaaatattgcatgtaattttgagaggtttttaaaatgacgtttactagttctaatagtcacaaaaaactccacaagggagattccattatcactcacatgaataaactagggcttagatagacaaagatttcaaaaattttaccagtcacgtagctagtaagtaccagaactaaagtaagccttcctatccgtgaataaaatatgtatccatttatttagatttccctattgtcctgctacaaatgcctataggtttctccatttttctccatgaaggtcttgcacattaattgttagattcactccaatgtacattctacttttccttctttctttttttttttttttttttgagatagggtctcactctgttgcctgggctagagtgcagtggctcgttcttggctcactacaacctctgtctcctgggctcaagggatcctcccacctcagtctcccgagtagctgggactacaggtacacaccatcacacccagctcatttttaaaattttttgtagagacagggttttgccctgtttcccagcttgtcttgaactcctgggctcaggcaatctgctcacctcggcctccctaagtgctgagattacaggcatgagccactgtgcccagcccattctactttttattaaaattttgaaaaagatctttttctattatgctatatttcctaattggctgttgctagtgtaaaggaaagcagcaattttttaatattgattttgtgtcagtcactttgctgagatcccttaataatttatatttatgtgatctcttggtttttctaggtttgctatcatatcacttaaaaataatgacagatttgccttttctattccaatttatatacctctaattttgtcttatttaattgcattaactgggatctctcatagactgagactgctgaatagtagagtttctaacatgcatccttatcatgtccttgattttaatggtaatgcttctagtatttcaccatttaaatatgaagtttgctgtgggattttggaggatagccatcatgaagttaaaggaggtttcatttaccttctgatgtgcttaaaggttttgtttgtttttttgtttgtttttttattatatttcagtgttgaattttgttaatttttttctacatatattgagatggtcatatgaatttctcttatattctattaatatagtatattgataggttttataacattgacccagtcttgccttactgaaataaactgtttattgttcttttaatgctatactgaattttactattttatgtggggttttactctatttagatgaggttggtctataatttgtttttgtattttccttgttcagtttgttaccgggttatgctagcctcatagaataaattgtaacttaacatatttttctatgctctggaatggtttatgtaagagaagaattatctgttttttgatgactcttagaactgcctgtaatattgtctgggccaggagggtggggcaagtagaccttttaatattggttcagttttatctattattgaactagtcaggcttttctaattcttgagtcacttttgatcacttatacttttgcagaattttcccattttatctaggttcttgaaagtggtgctataaagttgaatatagtagtgtctcataatttaataaaatctcttacgttatagttatgtcttctttttcattccaaatattgctactggttcttcttcttcctctccctcctcctccttccccttctctctctctctgtctcatactctgccaaaggattgcctattttattagatttttcaacaatattaacaaccaaaaggacttttgcttttaaccaaaactgtccagttttttgttttgttttgagtgctagttgataatctctgcccttatctttattactgccctctctggcttcacttagatttcgtttgtgtcccttttttagcttcttgagttggaggcttcattcatttttgttttcatctaccttgttttctaagaaatttatttaaggctgcaaagtgtcctttaagcattgctctaaccaaattgtaatctactacattgatatttaaaatcttcatatttacattttttttaaacatggagttacttaagaatgcatggatctttttcttaattttcatattgctgccaatgaaatttcctgggatacagattctgagatggagattgtcatgcagaagtgttaatgagttttattagggagtacgcttgggatcacccttcgtggaagggaaaggacagaaatggaacttggtgaagggagaagttggactgagatggtcctgcagagttgctcccagttggggtgagatgaccaggcttttataccgtaccactgtgtatcatccagtcactgggtgtgggctgcccaagaaggggacatgaccttggacaaggcagctttttagagttaaggcaattcctgaaaagaattgacaggtgagagctgtctgccagcaccactcccaagtatctgggagatctgattggcacagttcagcacctactacaaatatgtatagtttaatattttagatgtacatactaaaagctatttaatcctatattgtgtggcatttaaatcgtttcgattttttgctattttaaacagtgctgccacaaatgtcctgggaggtgaaatcttgtggaaataatagtagtagttgcgaaagtgatactgttattactgtccatagttgctttcttaagataaacttatagaactaaaatgtcatggaaatgtacattttaaggctattggcatatagcgttaccttggctaatttacttccacaccagcagcattggacagtttctgtttccttcctttctaccaacaaggatattaactatttttaagttgttaacaatttggtaggtggcaaaagtatcttactgttgtttccatccaatggagtatactttaaatgaatatgaaaacaaaaggcattccccagcctaaaatggtggcacgagataccatgtggcaagagtaaagggtttatgtctaacatttctggaaggaaaatgaaattactgtttaaaaagagcttaaatattacttatttcactcaccacaattatcaaatgagaaacttgaagcatagagagtagaactgactgcttaggccaaggcaggcagatcacaaggttagtagttcgagaccagcctaaccaatatggtgaaaccccatttctactaaaaacattaaaaaaaaattagccaggtgcagtagtaggcgcctgttgtcccagttacttgggaggctgaggcaggagaatcgcttgaatccaggaggcgaaggttgcagtgagctgagatcgcgccactgcactccagcctgggcaagctaataaataccaggacttgggttagacccaagggctccaggtcttacaacaccttttatttgctttagaaaattaatttgttcttcctttctggtttccaaaccccatcaagctgtggtgtttctgtaaccggggtttatgagtgccctgtgaaatgatttcaatgttgtactttattcaaatgacaatgtttaaaattattacagatatatttgcattttctcgatgactttcttatgccaagtactgccacaagccaatgcccgttaactttgtgtcatataacataattccaatccaggattggaatcctggattcattaattaatagctctgtgacctaggacaagttacttaacctccgtgtttcagtttcctcagctttaaaatgagcataatatttgtatccacctaacagagttgttatgaagagtcaaccagctaatttgtgcaagttgtttaggaccatctgtcacattgtaaaggttactgaatattaatgaagtatttatttcaaactgggttctagacacctctggggtagaggaggccatccagggacatattgtctgggctaggcatgaggtgtatgcacctctagatgctgttgtccacagtgccgaatcattactacataatcgcccattaggacactgctggttggtggaggaagaggcacctggctacccagagccttccataaactcagccctaggtttctggaatgaaccagtaaatccaccctccatcagtttacaatctagagatggtactaataatctctgtaggtctgagaagcagtacagatgcagggtggggtgggggaatatgggctttgcattcagacagacatgggtttgaatgattgctcagtttcctgcaaggaacctggtcccaggtgtaatattacttaccttgagagattattttaaggattgcattaatatagaacagatagtagaccctcagtaagcggctgctgctgtttatgttgttatgggaaacaaaaaggggatgaggaaaaggaaaggagaattagagaataggagatcaggcgttggcagaagagagaggggagggagaacacaagcgcttcatgaagtggagaatgatgactggatggctgacctcaagttccttctactccatgggaacttaccaagctgagcgtggttttacacaccgttccaaacttgagtgttttctctttagtggggttttgttgcggttactgttaaaacacacacacacgtacataccacgccgctatcaccacaatacctaggcatttttacagagctgtctttctagacctgcccaagccccatactcatgcccagggctctgcaatgtctcttcgctgacaggtccatttctggtgtgggaatgagctgctagccttaatggagctgtcattttcttaccttcttggatttttggtttgtttcttgtccatttgcttcatgatggaaaatcttacctgttctatgccttctctagatgaatattttgcacaaaatgttatagaaggagtatgaaaaacacatccagattggaaagaaaggaaaattctgcagggaatataagtcataacatgacaattttaggagtgtggcatgatgacagttttctggcagtcatgggcctccagcttccctataatgttttactgcctcaggaaagtggaactgatttgacagacccaaaatctgtctgcttaaggtccccattaagaaaaagaaatagctccagatactccaagtttctcttcttagtcctgttccttacattaatgtaaagcagtgattacaaaacacaggcaggttgctgaccctccctgaatttctctagctctggtgcgggttccaagaatttgccttcctaacacgttcccccggtggtgctgatgctgctgggatgaggaccacgctttcaaagccactgacagaaagttttactagtgatgctctcataaacacttagtccattttctgctgcttataacgggatacctgaagctgggtaacttacagagaaaaggaacttatttcttacggttatggagggtgagaagtccaaggttgagggactgcatctggtgaggcccttcttactggtggtgattctacatagagtcccaaggtggtacagggcatcatatggtgagggggctgaacgtgttagttcagatctcgcttcctcttcttataaagccaccagttcccctcccatgatagaccattaatccatgaatggattaatccattcactagggcagtgtcctcaggacccaattacctcttaaaggcctcacctctcaatactgccactttggagattaaatttcaacatgaattttggagaggacaaacattcaaaccataataaacattatacaaataatctcataataaccttgggaagcatgtgttaatattttcaccattcccatttagagatgaagaagaacttgctaatgtcacacagttatataggatagagccaagatctgaattctggtctctaattccaaagtcagacttgtgcttggtgctctgggcagaagtctccctgacacagggcatgagtctagggcagacgcttccccaggtagtaatttcataaaggagacctctactcacaatcccttccctacatcagcccctcagcactggagttcagaatcagacttttccattgctattcacaaccctgcttccttaaatttccactgttaagggccccaagtggtgaagctgagtgaactctcccaggattcacagaggtggccccagggcaagagcaaggttttctttcgaagtcccatgttttgcctacaaatttcctggatattttgcattctattccattctgtgctcatgtttaatataatatagcttttcctccctcaaataatgttggcttttcaggaacaggccatggtttttattctggcttccattccccttccatgttgaggaccagggcgtggcatctccacaggtggcttattaatggcatctgtacctgcacaggctcaacacttaggtactcagcactcattcatccaaagatgttaccatgagctttgaacaacacagacttagattcctatacagtctcatcatttactagtaggataacttgggagaattactctgggcctgcttctacagatgttaaatgggcataaaacatacgttcctcacagggtttggtgactattacagatgaagtttgcaaagcgcaagatgtgttgcaatctataaatggaggttgctgctattgcttgttattacagtgatttgttgagcaagtgaacaaatgaatgaatgaccaatcctcagattgtgatgcccctgagctacaaacactcttcttagaccaacactgcctgcctgtgccaaagacagacccccaaagtagcagtcctcaacttctccttggagcccaaaagctttttctgggtaccagccactcccagctcccccacctgggcatttggttcagcctgacattttcatgactatcttgcggcagagattctcacattcactctgaggccactaatggtgtacaaagtacctctcaaatgaaaatcctctctgaattcttatggatagaatgcaatcccaagacttttgtgtttatgtttatttaaggactacatgccagtaatatgctaaatgagttattaggtattactcatatttaccactcataaacttaaattagatcattgcaaagttccccaagggctttaattcagttatctgtgaaatcaggctgcttctaaatgctcagcagctacagcccccacactcaagtagatggttagaatcctgtgacctggggaaggccccgttgttgtcattgcatgtcagtcttgctttgagttggttgtggttttcagctactgctattcttgcttattaattagaaattatagttcacttgacttcataattatcatattagtttgtgaaggatatttggctaaccctacagcaggcagtgatacatatttgcatcgaaggtatttttagcctataattttccaactactagattttaagacatgaataagttgcagttcaagcatgaatcatgcagattctgttgccaaatagacacatgcataacctgcccctaaaagtgcttgtgtagttgtcttggttatctacgattacataactaactgccccaaaatcttgttgctccacaattatgttattcgtctatgtgtttctgtgcattgggaatccagaccaggctgagcggggatgggttatctctgctccacgtgtgatgtctgccaaggctgtgaaatcccaaatggcttcttgtctcacaacacagctaggatgacttagatgactgggtgctggctggaatggcttgactggggtcttacatcttgggcttcagttcttgtcatcagatgggttgctcagttctcctctctgtaatgttagatctcccttcatccacgtggcctctccatgtggtctctatgtgatctctccagcaaaatggctgaacttcttacatggcagttcagtgcccttaggaactcagaagtgggccttctcaaggcttatgcttgacacaggcacagcaccacttctaatgcactctcttggttagggcaagttacaggtgcagcccggactcaagggaagaaactagaaagggcataaatatcaggaagcatggtttgggggaccaccaatgtaaatgacgaccacaatagtgacagttcattgataaattcaagcaacttatgtaacttacaaaatactatcagattaagcataataaagtaacttgattataagtctatatctgttataactttataaccctgatagcctatacttgtgtaggtcattattttaatataaaatgtgagtgttgatgtatattttatggtaaattaagtgacttgtaagtgatactatcaacaattgtactgcaacttgcatcttctgttcttcttgaattctttttatcacccagttcctcctctatagggacatgtaaatagatgtggtaggaactttgactccatgaaaatgatcttggtcaataaaaggttgagaatcatttttctagtgtcaaaaaatgaactcttagaaatcttgtagtagctagaggtgcaaagcagacaggacactctttctgccctgaaggagttcaaagtcctgtagggaagacagttggtaagtacatgcactgcagtaaatgtcataatggagaaaaacccaaagtgctactggagagcagacaagatatgcccagccaggtctgggcaattaaagagggcatcttcaggtgcaatttgaactaaactccaaagcctgcataagagttatagagttgaagaaggaacagtaggagttaaagccagagatggggcacttgtcaagttgcgactttccacaagtctgagaagagaaagaggtttttatctttgtagcttttagtctttcttcccttatgaacatgtactcattatggctttgtaataaaccttcaaatgcacataaataggcttctccaatctgatgtcatattcatgaattaatgtttttaggagagcaaagaggagatgaggaggtgtttgttcctggataattgggtatggctgattcattcaaatgaatagagagacccagggtgcaattcaatactcattgaatttgccttcttcctcctgacttgtgatttccatgctgacatccgtacagaacaaatagaatttgatccagtatataaaattgcagagctagaaaatgcattagaaaccattattcccaccccctcatttcatagacaaggaaactgaggccaaaggagctgaagcaattgctcagagtgacatagctgtagagacataaaatactcttctcctacccaagtcagacaatatccaatctgagttttatttagaaaatcctattcaattttttctgtcagaaaagatgcttggggtggtaataagaagattgttcatactacaaagagcctctgagaggggagtgatggagcaggctgctgagggaagtgccgagcttcgtgagctagagaaagccctcctggctgtcagctgtcaccttcatcaaagggcagaaggcagaggcgggctgtcacgtgggataccatctggagagtcaggcaatgttttaggcccctaacttttcttgaaggaaataaagaatggtgtaaggccgggcgcagtggctcacacctgtaatctcagcactgtgggaggctgaggcaggcagatcacctgaggtcaggagttcgagaccagcctggccaacatggtggtgaaaccttgtctctacaaaaaatacaaaaattagccgggcgtggtggcaggtgcctgtagtcccagctactcgggaggctgaggcaggagaatcacttgaacccaggaggtggaggttgcagtgagctgagatcatgccacaacactccagtctgggcggcagagcaaaactccatctcaagaaaaaaaaaaaaaaagaatggtgtagccttttccactgtgaattcaagcactgagctacaatggaacaaccatgataatgataatatgaatatttgttgagttatagcaatgtataccacatcacctcgtcacccctcctcagcaggagcatcagctccttcaggaagcttttcctgattatttgtgcctgcttcagacacattagatgaccccataaatctctggacatatctgcaccacttctcttgccagcttgtatgttaattattaatagctgtttgggtgtctgtcccccacagggaatcatcaaccaccgcaatagagaaatacataggattctgtggaacacagctgggagaacaggcaaatttgctcaaagagttccaaaaagctatagaaaagaagtgaccttttaatctggatctaaagagatgagtagagatttgttttaggaaggaaggagtaaagggcatttcaagtagatcaaaggcatggtgtgtttgtcaggccataatgcttatggggtcctcccacatccaggcactttgctagtgctaagagtagacagaaggtagatttggctggaaggtggagtgtgtggggcaggaggtaatgggggtgagaatggggaggtgagttattaccacaggtaaagaaccttgtggaactagctaaggagacagctctttttttcctggaggccaagggaggcttctgaaggattttaaggagataagtgtcagagtcctatttaattctaaatgagaaagatctctatgaacaggtatggtgtgattcataggatgtattgattggtgaaaaaacaatatgcagatgatgatctataatgtgctaccttttgtattagaaagaaagggaagccaggcacagaggctcacatataatctcagcactttgggagaccgaggcaggtggatcacttgagcccaggagttcgagatcagcctgggcaacatagtgagacactgtctctacaaaaagttaaaaaaaaaaaaaattagcaggtcatagtggcatacacctctagtcccagctactctactgggagggctgggagggggctgctgaagtgggaggattgcttaacccaggagttcaaggctgctgtgggctgtgattccactactgctctccagcatgggtgacagagagaaaccacgcctcaaaaaaaaaaaaaagaagaagaaaaagaataaggaggaggaggaggaggaggagaaggaggaggaaagggggaaataagatattcacatatcttctcacatgtgcaaaactaaacacaggaagtataaactagatactataagggtaagtgagaataagatagaaaagaggagatgggaaaagagtaagaggaatgagggatacttctctgagtatatctttttctttttgtttttgttttgagacgggatcccactctgctgctcaggctggagtgcaatggtgcaattatagttcagtgcagccttgatccctcaggctcaggtgatcttcccacctcagcctcctgggtatctgggaccacagatgcacaccaccatgcctggtgaatttttttgtttgtattttttgtaaagacggggttttgccatattgctcaggctggtctagaactcctgggctcaagcatctgcctggctcagcctcccaaagtgctgggattacaggtgtgagccaccaacgcctggctgaatatatctttctatatagttttgactttggaaccatactgaaaaagaatcagtggatatgaagaaaacatcctaaaatgaaatacaaacagaaactgatgggagtgagaaagaactaacctacgtaacttttgagagtagcattttgaggatttgccgttgcctgaaaacaatagaactgtaaacaaatcttgaagtctattttgtttttcacagaggtgtggactggcaattctgaaactactttctgtgtattaagcaaataagtatgttgtagatgatggaaacaaagcttgttagagaagatagttaaaaaatatggaaggaagggaaggctacaattgactttgcaatgtcggactggagttggaggtgtaagtatgaactcaaggtatttaacagagagagagagagagagagagagagatgaggggtgtgtgtgtgtgtatctgtgtacatacatctattttttttttaagacagtgtctcactctgtcacccaggctggagtgcagtggcaggatctcggctcgctgcaacatccaacccccacctcccaggttcgagcaattctcctacctcagcctcctgagtagctgggactacaggcatgtaccaccacacccagctaatttttgtatttttaatagagacagagcttcgccatgttggccaggctggtctcaaactcctgggctcaagtgatccttccgcctcggcctccaaaagtgctgggatcacaggcatgagccaccacgcccagcacacgcatctattttctagctctgtccttgatagggcctagaagcaatgacaccccagcagcagtgagcatacgtggtacccaagctttggcttcaaatgccattcttcaccaaaggaactccttagagaaatgactgattttagcacttgagctgaggaagtacgagatgagcctgaaacattttgtagtgctagaaaataaggatgtgctgaaaaaatgactgagatatatctaaagaacagatcgccaccttgactgagcttccactgatcaaatctggaataatctgagagtcgaagatagcaacagatttgtaacccacagaataaaataagaatctgtgaaaataaatatatattatatataaatgcagtttttatacacacatatatattctttatatatttataatttatctttatttatagtagacatataaattgatataaataacagaagggaaagctcttacttacaatagactcctaactaacaaatataaagggaatgatggaattagaaaatcagtatcattgtaataattaatccaggcaataatcattagtggacgctaaaactagtggataagggttgatgagcaattacaaaattacaacaacctggagcagtatcagatcaagttcagaaacctgtggcacaatactagaaactttctacttgactactgccagctgattttttaaaatttcaactattattcagggggtacaggggcaagtttgttacctgagtatattgcatgatgttgactttggagtatgaatgatcccatcacccaggtagtgagcatagtacccaatttttcagtttttcagtttttcagcctttgccccttccccctgccccctctagtaatccccagtgtcttttacttccatatttatgtccatatgttcccaatgtttagctcccacttataagtaagaacatgtagtatttggttttcacatattttctatttggtatttggtattttctattcctgtgttaattcattttggataatggcctcaagctgcatccatgttgctgcaaaggacatgatttcattcttttttacggctgtgtagtattgtatggtatatgtgcattacattttctttatccatccagtccatcattggataaatggataaattggataaatccaggttgattccatgcctttgctactgtgaatagtgctgtgatgaacatatgagtgcacgtgtcttttttgtggaactacttattttcctttggatgtatacccagtaatgggattgctgcattgcatgggaggtctgttttaagttcttcgagaaatctccaacctgctttccatagtgactgaactaatttacattcccaccagcagtgtataggcattcccttttctccaaagcctcaccagtatctgtttttgtctttttaataatagtcatggttttgatgtacatgtatctgatgattagcaatgttgagcattttttcatgtttgttggccacttgtattgtcttcttttgagaagagtgtgtttgtgccctttgcccactttttaatggggttattttgggttttttttttttttcagctgatcgtttaagccacattgctacatgttgtatttgcaactggatgataataacaatcatttattgagtgtttgctatgtgcaggcattgcaccaggtggggattttgtttttatgtttgttgcatatattaacccacttaatcctaacaccaacccagtaagctttttcattaatatcttcatgttttagatgaagaaaccaaagttcaagggatgaaaaatatgtctagggtgaaatagctcagaagggcagagcccagattcaaattctctgccttctggttttagttcagtgttgttctgtcatgcagtgtgcctatgcgtcctcttagatctccctctgtgcttctgaaggtgtgcagaatgcccaggccatggaggcattctttttttttttttttttttttgacagactctcactctgtcgccaggctggagtgcagtggtgtgatcttggctcactgcaacctctgactccctggttcaagcgattctcctgcctcagcctcccgagtagctgggattacaagcatgcaccacgacacccagctaattttttttttttttttttttttgagacggagtctcactctgttgcccaggctggagtgcagtggcgcaatctcagatcactgcaaggtctgcatcctgggttcaaaccattcttctgcctcagcctcctgagtagctggaactacaggcacccaccaccacgcctggctaatttttttgtgtttttagtagagacggggtttcactgtgttagccaggatggtctcgatctcctgaccttgtgatccgcccgtctcggcctcccaaagtggtgggattacaggcgtgagccactgcgcctggccacacccagctaatttttgtatttttagtagagacaaggtttcaccatgttggccaggatggtctcgatctcctgacctcatgatccgcccatcttagcctcctaaagtgatgggattacaggcataagccaccgcacccagcaggaggcattcttaaacagaagcactagtggctccttctttctcctcaccatgtttactaaatacctaacctcatttttttctcatccgcaaaacagggacagcaatattgaattgacatgttattaagaggactaaattagataatgtatataaagcatatagcacagagtaaagtacaggtccattcattgatagcagcagcagcggtgacagtggttgcaatgctagattccctggcacgatggcaaaggtttctaaaggatactcctcactttcgtactaaattgatcatcacgagccagatcataaagagctttgtgtatcatgaaaagaagattacatcttattctacaggcagtagaaactactgaagaattttattaccgagagagatgtgatctggttggcaatttaaagagcagaccaaggggaggagaacaaagcgcaaggcagggagagcagcaggaggctgttgtcaaaggccaggcaagagataaggaaggtctgagttaatgccagggctggtgtggtggacaagagggagcacacagtggacagtcaaactccggagctgtgcctgggtttggcaggagagaaaaggggaggagcttagctgagcctcctgcctctgacctgggcactggcttctcttgggcataacccgagcggctggggacactggaagatgcagatcaggggtggtttgggacacacaagggagtcacagtagatggttggatatacagatctggattaaggcatctgaatatctgaatattcagattcagaccaaggagagagctcagggctgccgcagcatgccgggggtcattaaagcttggaggtggatgaggtccatcagagaagggatgtagagtgagaagagggctgaggacaggattttggaagtgcccattttttctttaacttttattttaggttcaagggttcttgtgcaggtttgttatatgggtaaatcacatgtcacgggggtttgctgtacagattattttgtcactcaggtaataagcatagtacccagtaggtagtttttcagttctctccctcctcccatcctccaccttcaagtaggccccagtacctattgttcccttctttgtgtccctgtgttctcagtgttcagctctcacttataagtgaagatgtgctgtatctggatttctgttcctgtattagttcacttaggataatgtcctccagctccatccatgttgctgcaaggaacaggatctcattcttttttatggctgtgtagtattccgtggtgtatatgtactacatttgctttatccagtcttccactgataggcatttaggctgattctatatctttgctgtggaaacatttcaatatttaaagatggcaaaagaagaggctgaaggagactgacaagaaacacccagaaacataagagagtctctaggtggaagttttctgccatggcaaagaaagattgcagagagagaaacaagccgaggaaggactgaaaggtgcctgctggatttggcagctaggtcactgatgaccttgacagtagcatgtgccaaggagcagagtcgagctggctggattaaggagagagttggacttctcagggcgagagactagaacttaatgtccccaggaatgtgggtctctcatttccttgccatgcattctggttaatggaaggttttctttataaagctagaatctctctctctccagcatcttccctcagctctagttcactctccaggtccaaaacaaccagtctacacatttccccagagaatggtccatatatacctcccaacttggtcgtctcatccagcactgctcatatgctccaggaaccccagacttgccttgcagttggccctcaggatggatcctgttttgttaaaactgtgcttgttctttggcaacagtagagcctgtgtttcagttggtctttatttctcacctttttaggttggtggcttcccaaccatgcttgtaacctcaactgagaataagaaagacacttcacaatatgatcagtataaccatgggtgtataactgaaggaaaagtcttatgacataatacatccccttactgtggtagatgcactctagtgttttcgactccatctcattctaccctattccatttcatgtgtttacatgcttgttgtgactcattacatcaatttcacaaccacaaaactgatttaatgacccacagtatgagaggctcaaaggaaaagatgctcagtgtttgtttgaatccatccccatttcccggcctcattgaggccagcagcccattcctctaactccctttttatggctctaagaggacagagaactgcttcagtcactagatgttagccagccttggggttattccagaatggctcaccagagctatcacggtggaatttagaaatcagtgcaggacagaacggctgcataggctcctgttcctgtaattactcatgaagcatccaatagcctaaggcatttttatgccctgaggatgctcttaggcagctctaataccacctctcatgtgacacatggaacatttcccagagctgagtagtatggcccacctattcatacaggccacagcttgcccctcaactctcaccaccagccagacaactgtcgttgtgccctcttcagacctctctaaggggagaaccatccttaagaaccattgaacaattgtcccctgtagatctttcagcaaagaacatttggggccttttttttttaacattctcatttacaatgtcttttctgcttctatctaggaagagccaggacttctgaatttaccttgaatacagacaggaggatgttgcctaaggaatagcagagatcttgtctcatcttctgagaggtgcctgctgctgctgtatacacttgagtgctcccagaagtctcctgaaaggcttacatcgcaaacctgcaatgagccaggccctgggctgggcctccacttcagcctagtgaacaaaactccatcactgccctttagccactcacataaagtttaaaaatgggtgaagaacggtgggtctccctcactccagaagaatttgaccaactccagaaatattcagaatgtgagtaaatgcattgacagccctgggacgggatttcttcttggctggagaaatcatttctggaaagcatagcagtatgatcattgcaaagccacaaagaatgatgtcaggcctgacggcttatatttccttataaacacagaattagtgtatttaacataaaaacgcaattatctttaagctcagtaaatactacgtgctcaccatagaaatttgcaatatacatagaaaaaaagagtaggttaaaaatcactgacaacactgcaaacatcttagagcacttccctgctgtgcatattgctttacaccgttgagctcacactgtatacaccctgcgttaagcctgcattttccgcctaatatatcgtatgtatttgctcaggtcattaaagctcttcagagcataattttgaagggctgcatgctgcatggctacaatgttactcaatcgtttactgtagtatattcctgcatttggacccaaagccttcttgcagtaagatgctgaatgctaatgtgtgtttctttcttgactttgttttgggaaggcttgggcttttacttggggctcttggtttcccattagttgtgccccagaaccaattcagtgcaagacacagtggtggtagggtgcacagccacacatgggcccatggcttgtcccctcaggttactcctaatccttattggtgagaggaacctgctggactgtggcaggacaccacctgaccactgcacgctgcccacacagagtgaccgtcacttaccctgcatggcactgactttccaggaggcccttcatcttgtagagctctcagctgcactgcctgctccatgcccttgtcccatggcctctcccttcacattaactgtgttgatgcttctgtaaatcatgaggcctgcagctgttgacctgctctattgctcttgcacaggtcccccttctcacacagtaggcagtccttgtccccagcgctggtctaggagtcagggaatccagttcaggtgccagctctgcctcttgctctctatgctgtgacatccctgaacatccctgggtctcagcaacctcttctatacaatgggagggttggactaagtgttctctccctgcggtcccttccagcccagcatcctgtgactccgaatgctctccgaggtcaacaggggaccatagggctaatggtttgtcaccctcctggtactctagagcctgtggtctctcatctgacccccatgggtttagaaaaactctaatatattgacaagaagcaaaaaatcaccctccagggtaaattcaatttaattcagctagctctgtaggtcagcaaagcaccaagccctgtcagggatgaagaagaagcacaaaggagaggcctaccctggaggaatcagaatcttgttagggcatcagaaatgtgctcgtgacacagagaactgctttaaggcagcaggcaaacagctctggtacagctggataaactaagcgtggaaacgagaaggggatcaaaaaccaagggaaactggtatgggggttgtttgctatttggttcaatccagcgtgggtttattgtctctaagccttatagtctcaaagttctgggagctagaagtccacaatcaaggagtcagcggcgctggctccttctgagagctgtggagaagggatccatcccagggctgtgtttttggcttgcggatggccgtattctccctgcatgccctcacgtgacattctccctgtgtgcatatctctgtgtccaaagttccccctttcctaggcgcacaaccttattggcctggatccccccattcggtcatgacttcatcttaactaattacatctgcaacaacccaaataaggttacatcctgagttattgagggatggaacttcaacacataaatttgaggtttagggcacggttgaaccgataacagaggatttagctggataaactccatggaggaaagaggtttaaaatgtgagcagcagatggaaggggaacgatggaagcaaaaggaatgtttgggaatgttgattttgagatggtgataacacacccactaagcattcctgtggtgtgcaggggtgggtaaggagagcttctgggctggatggtgagaaggcacagaaaatgaggaggacataggaggcgtggggatagcaggaggtcttgggccttgtgtgtcaaagtgtgggcaaaatttagagccaggaatctggagactgtgtgcagggtgccttggatcaggcagtttccaggccagggaactgggcaggatcctttggaggaaacctagtctgagccaaagagctaaggtggtgagtgtggccatgaacaaatgctaattcgtgggaaactgtggtggaaatatcatcaatgcacgtacaacaaaaggaagccatcaaagataccttgcagactgaatctgtagaaaatgacatcaggatgcagggctgatggggaatgtttgggattgttgatttggagatggtgataacacatccactacgccttcctatgtgccaggctccagggatccagcaataaatgagacacagttcctgccctcaaagagatcactgcctcacaggggaagacaaacaggactcaagcacgggtgctgcagtatagccggtgctcagaagtgggcagcatgggaggagaaggccccgctcagcctggtgggaggcctcctgatgcacgcattgtttccagactccaggaactgtagggcagggagggagaagggcattccgggtagaggacgtggcttgggcaagggcagggcagggtggaggacatcatgggagcttccaagaactgcaagcagctcccaggctggagcccagagcatgtgttggtggtggcatcaggagtgttgggggaagaactagaaaggaaagtaggaccccatcctggggaatcctgctttctaagaaacatgtcctgtaggccccaggagggtgtgtgatgggatttgagtggaaatgaggggtcagtccatagctctggtttgggaatcatgcgaggagatggcaaggagagaaagaaaatgaatgaaggcactcagacagtaggaatgttaggaaagaaaagaagaggctggagaatgaggcttaaggtatgcctctatcaggattcagcagaagacacagagagaagaaccagaaaggcaagtaggtggaaaagagtgcagcatggagggcgcaaaggcaaggaggagctccaaatgcagcaaagccgctgagcaggcggagggatgaaaaggaaccagagtattcagtagaagagggttgtgttggggttgggccttttctttaaacatttacctttgtccttctctgacccttgctcgtgttgtccatgtcgcgggactggatgaggcactctgctactgttgttcgaacaggagaggaaaaaaagatacaattcttacaaaatgattaatcctcagaggaaaccctgaaaaagtcattcccaccaattttagacacattctggtgttcagtcggattgcattgccatagcaaccactcttccgtaaccacataaacaggagctttacaataacaaaataatgaagtgtacagcctgagaattgagaactttctccagtggggttaccaggtaggagaggctcttgttgttttccatttatatagtgtaaagttggcaccttctctggtgaccttctatagggtgagggtggggcatcttaaaactgctcttggagacaagtaacttaactttgtatgtaaacgtacatacatatacacacagacacacacacatatagctgacagtaagtttgttatcaatctacaatgtaaagtacttatcaaaagagctaatgtgatattaagaaatttgtattataaaacgatgaaatttaaagctactcatgattctattttccagtgataaccagcactagcatgtttatgtataaatataagtataaatatagatatcaaaatatgcaagcacatatacatatatacacatatacaacatacacatgtaaaacaaacttgagaatatgcatgttgtgctattttgtatgctgttttctttcccttaacaatatgtttcagttacctattgcagcatcaaaacaacttcaaaacttgtgtgctgaaacaaccaccattttggtttcccatgagtctgtgggtcaggatcctgggcagacatggtgggcatgactcatctctgctccacagtgtttggaccttcaagggggaggcctcaaacaagtgaggacttagaccatccgtcatggctcattcactcacatggtgggaccttagtgttccttcatggaacctctttctccagcactttcttgtcttccagggcctctccatatgtcctttcttttcagcagggtaacctggaaatctaacatgtcagctcagggctccaagagcacagaagaagctgctgtcagatctttttagcacctgggatcagagatcctagaacggaactccctccacattccactggtcagtgcagtcacaggcctggctcacattcagtgaagtagaggaacggactccacatttcagggaggagggactcacatagggagggaaagaatttatggcagccatctttggaaactggctagcacacaatatcgatcatgagtcattcccacatcattctgtactcttcagaagcatagctgttagcggttgcagagatttttttttttttttactacatttgtactatttcatctaaccaaatcagtcattgcaatcttaggctgtattcatagactcacagtgcctagtaaggcaaactgatatccacattctagcctaccctgatagaccgtcagacctctctagagaactgaatttatttatggtcactatggtttacgatggacatggacaacctggaacttgtttgagagttggtaaggggcctcacaaccacattatggagaaatgaagatactgtgcatatttgttggagaagggaagggaaaggtgaagaagagctcgttgtattaaaatagctcagtactgttgtgggaagaggtgtgtagttaattttgaatggcttcaagaggtagccctaggactaatgggaggaagttataggaagtctttaaagtgtggaatacattaattactagtggtcaaatctgcccaagatggaatcgaattgacttaaaagtgactgggtttcctttccctggaactgtctgggcagagagtttgtttggacactataggggagataacagctttagtcatctggttgattaaatgaccttcattagctcctccaatacttggtttctatatttaaatagatttctaccgcagagggtgtgtgcatgtggggatgccgcctactgaccctcttcctaacaataattgctggtggccattggggggtgggcattttttcttcaattttttgttaattccttaaaagttccatgatgcctcaaggacagaaactattcatttattcagaaagagaaaaaaggaaaaacaactgaagaagcatccattaaacttttaattctctaagaaattaaaccaaacatttcctacatcagccagcagttgcttggactgtgtagaactttttttttttttttttttttgagacggagtcttactctgtcacctagcctggagtgcagcggcgcgatctcggctcaccacaacctccgcctcccgggttcaagcgtttctcctgcctcagtctcccaagtagctgggactataggctcccaccaccatgcccagctaattttgtatttttagtagagacaaggtttcaccatgttggccaggctggtctcgaactcctgacctcaggtgatccacccgcctcgacctcccaaagtgctgggactacaggcgtgagccaccgcactcagccagaatttttaagttgggaaaaatcttaaccatatcaatgccaagcattacacattttaaaactgagactactacgtccagaagagctcagtgacttgcccaaggtcatatagaaagaaggtcgatagtaaaatagaaattagaaccaaaagtccctcaattctagtacaaactcatttgcttcaattcagcaacaacaaattaaacaaaaagtacccactggagctcaaccttcaaacatacattaatgtgtgtgtgtgtgtgtgtgtgtgtgtgtgtgtgtgtgtgtgtgtgtgtgtgcagatatgtatatgtcaattaaattacattaaagcaaaattttaagatgtaattaaagagaatcaatcagtaaattgtgctattaggaaatatatttctttcgaatcagattatgacaaagtttctgactttaagatgtagttacagttcaaaatacaaaactgtcagagtcagagaacatatttagggctgatatgtagaaccatagaaggctctaagtaaatgtcactaaaaccttgctatttatgctggccagtagagtgagacttgatcaaatgctcatgaagtcctgggcccatgaagggtcatatctagttgcttctatcttggaaggatagccataactatttctcacctacatgtgtttcagcaccacagacctttttttcttttaacgatgagtaggactctgcccaccaggagtcacagaatctacggatagggaggaatttctatggaacaatagctctcaatgtttaatgtacacatgaatctcctggagagctgttgaaatgcagactgtgaatcagtaggtctggggtactgctgagaatctgcttttctaacaagctcccaggtgatgctgatgctgctggtccagggaccacacttttagttgcaagatggtccaagttgtctgatccattcctccaccttcacttgaaatacgactgatgaagccaaattatttggagaaaaggtgagaaaatgttctagcaatacaaattttacttacacaaataagtcataccagtgattcagatcatttatgacaaaaaaattgtgtcttaaaaaacgttttattgctattgaccccaatttcctctgcttctatataaagtcttttcttattatttcatatgtaacatctgtgtcagagccatcacttccacatgtcagtggtcctcagcctcggctcatgttcaaatcacatggaaggcttggaatacttccaatgttctgcccacacctcccagatcatttaatcacagtttgtaggcaaggggcctgggcatcagtattttttaaagccctgcaagtgatttcaataagcagccaaggttgataaccactagtctaccttttctttccatacccctgagaatataggacatgtgggacaagtgtgaccagctcaatccctttgctagccttcatttattcaatagatctttcttgaatatctattttttttgccaggcaatgggctgcatgctggggatgaacagtgagcagaaacaaagtttagatgggagaatatgtgtgtagcaagtacatccgtgcttatgaagctgggcttctcccctgtgcttcccacgtgctgctctgaggcctgactccagctggctgaagaggtgggccttttgatgcagtgctcttggccctggcccttctgttttgacatttttcaggaccctcacaaaactctgctcttgtttttgtgcatctcactgtataacttcctagagtaattagaaaatgtattcttacatcccagccttcactggaagaaggaaaatctagattttatttttttgctcatgcgccaactttcccttcccctcgtctcagtgactccccctgcccaccacttatggtctttctactccattgagtatgttcctttgtcctcggcatcgtggtcttttctgggttgtgacaggcaagcctcagcagtcagccccagatccacagggacattgcttagagcctgcgtatcaagtgaggtccgtgaacctgcaaaattggtgtcacttaggatcttattcagaatgtagaatctcaggctgtggcccagtcctacagaatctgcatttttaccagatcccaatgtgactcatacgcacattacagtttgagaagctcatagagaactttgaggaatgaagagttatcatgtaccttagaattccactctcatatatggattttcagattcacttttgaaaatgttgatttatagttttttcggagtttaacagtttaatggtctaatgctcaaatactctgtgttcttttttttttttttttttttttttttttttttttttgagacggagtctcgctctgtcgcccaggccggactgcggactgcagtggcgcaatctcggctcactgcaagctccgcttcccgggttcacgccattctcctgcctcagcctcccgagtagctgggactacaggcgcccgccaccgcgcccggctaattttttgtatttttagtagagacggggtttcaccttgttagccaggatggtctcgatctcctgacctcatgatccacccgcctcggcctcccaaagtgctgggattacaggcgtgagccaccgcgcccggcctactctgtgttcttaactagacaacagactataaactttggggtctagtcctggcagcacaactaatattctgctgtaaacactgaagtctctgatttgtctgcttgttcagatggaacgcacccctgtcccacactgacaaggcaacaaaggtgtctgtgtgtagggccaaatttttccctttaaaaggctttgaatttgctcaaacactaggaacagtgcttggtttaggtcccagagttcttggcacataaagtatagaagacaattttggactgaaaacttcttagggcactggtaaccttgatcaaagagaaaaactttctgaacacccgatttaggacagaactgtatgtggatagtcctgacagtctgggtgaatgcaaaacatgctcctaccttgccaagcagctgaacaagttgacctgttgggtagagttctttggtgttgtccacttaaacaatggataatgtctgccaagcacagcaattttaaatttagaagttataagcttttttttcccttggcaataagtattcaagttcaggggctttttaggacagtcttcatttacaacaataaaatcatgtcctagaatggcagtcctcaaccttgactgtacatctgaattccaggaagcttttaaattatactgtgtcctgggttcctcaagagatgctgacttaattcacctggggtaagacctgggttacagtgtgtatagagctccccaggtgatttcaacatgcaggcaggtttgagagccactttcatagaggaagagtcctggcttctaacttaccagtgttcaagtatccagtgaatccaataaccatggcctatgatttagaaatgtttaagaagtgtgacttacgagctgtctccttgaaagaatcacttaaattccataagcctcggtttcttctctaaaataaggataattattacattagagggtagttgtggggatttaaataaaatatataaggtgactaggacagcgtctagcatataataagcactctacaaaatgggaattgttacaaagagctgtggaaatggccctattttctacaggcagaaatggaacaaggtgtcctctgaatctagtgctggtattatggtaaaggctttgacaaaggaattttctgtgaggttatactattggacccacagatgacacctaaaataagaccaagggatgctattccctcgttgttcttttctgtcttaagatgaaacagaataaagcagctgtcactgaagcagattagtcatgcataatacctacttactcctcatggaaaaagaaacccaacccagacatctattaagaagaaaactgttataaagtatataaggacatccaaggagaaagtaatgtgtcccaaatttgagaattaagttgattcccttttttaaagggtattgatactataatcctatgaaagcccataaagcaaattgaagtaaatgtgtgatgagtaatccacctcacggaaagctagttagaaacctcctggattcttgttgtgtgtgtgtggttttttttttttttttttttttttgagacggagtcttgctttgttgccaggctggagtgcagtggtgcggtctcggctcattgcaagctccgcctcctgggttcaagtgattctcctgcctcagcctcccaagtagctgggattacaggcacgtgccaccacgcccggctaatttttgtatttttagtagagatggggtttcaccatgttagccaggctggtcttgaactcctgacctcgtgatccgcccgcctcagcctcccaaagtgctgggattacaggcgtgagccaccgcgcccggctgtgttttttttttccatttaatttcaggctattaatcagatattttaaaataaatgtcttttctatttttttcttattaaaacctcagtttattttatgcgaacatatgatgaatttatgtgtgtatatatatcacacatttaaatataaagcaggatttttaaaatagagcagcagctctttagaatcaaaggaattctgctacagtgaatggtggaatatccaaaatgagatgagaacatcaaaatatcatatattcaattgaaattactccactggttctcaatcaaaatgctaactctacactcttcttgcagaagtcacaccaggggtactcatgttctcagatttttattttttttatttagccattttggctgagctaacaacctcccattaaaatagattctaaaatgtaggatttgttttcctaaataattaagctgcttgtggaataacatatatgtgtgatgttaactgagctctggtctcattctaacttctctttcatcctgtttccagagtggtctttagaaaacagagagctggttatattatttcaccactcaaaaaaatctttaaccatttcaaatcaatgttcttaactctacattcaagacccccacaaatctagccacaaatgactctctggttctgacttgtcctaaacgttttatggtgcccatctctgcaccgttgctcccttggtctcttccgagaataccctttccacttcatatctgcctttataaaccttacccaattctttatgcctcagctcaaatgctacctcctttatagggcagcctcagttcccacccctaccccactttcatcttaatttttcttcttcccaacttggtgtttcatagaacttcatatcattgtgtcacccttaattacacctttctttatgttaacaaatgtttaggaagctatagtgaataatgctcaagggaaaagaccatacacttttgagccagactagacctgagttacaaccctggctcttgagcaagtcgaattaatttttctgaatttcagcttcttcatctgtaaactgaagaaaatacttgcatggattagtagaggagagtttatgagactatgcaggtgaaggtctccagtaagggacagctattagtaccacagttatttagatcatctttcccactagtccattaacagtatcttgccgcatcttaccctccttagtgttttctgaattgaatggaagcagcccaaattgacagcatctgctgcctggctcttactgagctattagtttttcaacatctgttttgaatttcagaaagaaatttccatttttaggcaacagaagcattttcctgttgtatttcaatatgtctcaatcctgaaatgattagaacttctgcttgattgaatccaagtcagcaaagccatggagaacagcccagcccacgaatatgtctactttacctaggcttaagagacattaaccctctgtacaaagagcctgggcaacaaaaaacactgtgtgagcttttaataacatcgtcctttggctcagatgtttaaatagcaacaataatggagcttggaaagctcttaattacccacaatattggaagagagggatagccaaggtcagagaaaccctggtttgctttgatgtctagagtgctgatagctgcacaagatgcattcataatgtgtttttaataacaattattgagtctcttttctggattcccaattcctttataaaattccaaaaagaagcagccagtcttgcctccagttgcttctgaatgatttcctatggaaagcagcattttcgaaaacaccatgtttgatgaattatctgagtctttctttatccccttccaaagtaaatgcaacatagagggaacattaaggggaaatcatggcggggggtggaggcctcaactttcagaggaaaatcttctggctgtcagaaatatgtgagaaataccatgggaacataaaatcaaccatgctaattatgagacataattgaggttatgttttatgtgtcagaatgagtagctcaattttatccatcaagataaaaaataaaaatcaggtaaaaaaaaaaaaaagggacagagttgtcaagattccagaagtagaagaaactatcttgccatagtgtacaacagtgtttcagcaccaaggacagagccttatggggtttaatgcccactcatcctacatacttaatgaatttttaatgttttgaaattttcactcagatgtttatatactcatctacatattgtttttctgagccctagttacacgtcagaccttagtatgatagacaaagactcaccagccagttaacagctctcaaggtaaagctgaagcaggagatgagcaagataggcaagttaataaataattataacactatatgacaagcactattacatagttgtgtacaagtcacgtgggagccaatgaagggaatgcttaactctgactggtgcaaaggaagactttacaaaggagttgacatttgagctggatcttgaagaatgagtgaaatttgcaagacagagaagaaacatcatgagagagtgcacaatatgttcagggatgtctggaaatgtaacttgatatggctgaaacgtagagtaaatagggaaatgaggaataggataaataaaatcaccaagggctggtattccaagttaagggcttatcttctaagctaagaatggtaagctttatcctgggggaacagaaagcccttgaatggttttgagtagggatatgatctgatcagatttgtgtttcagaaagataatttagatgcaggggggaagtcagatggaaaagaagaagtgagaggacaaagggtagaagagggtgacatttctccagattttctgggactgaggggcagctccaacataaacatggttacacagggagaatttacttggcccagcttccattagctatttgccagtgtttcacatgtgaattgtgtctcttcagattcctccaagaagataaaagatgccttgactgaatttaatgagggtgggagcctcaaacaatatgacccacatgaggtaagaacatttccattttaagcctttaaaaacccctgtgttttttagcctttccataatttgtttccctcttggagactccgcttgccttgaagaacttgctcctcagcatgtttcctcttaagtctcaagtgagccatttgtgctacctggcattatatgtttcccaagcccatacactcattccactgtcctagaagactaccactacttctcctctgctcatctctcacccctcctctcctcatcctcagttaacaactgagttttctgcttcactgaaaaaatagaacaaacagaacagatctttcacaagctccctcaccccataggcccacctatctgtaccttttcttctataaccagagatgacctctccatgctcctatctacgtccaactcccccacgtgtgcactcaaccccatcctcttttggcctacttacaggcattgcttcagcaacatatcttccccagactccctctttccctccctcctcgtccctccttttctctatatctctacctctgtctccttcatatcagctttcttcgtatattttatttttccatcaacatgtaaacatcctgttatttcttctatattaaaaacattttcctgactccacttcctcctctaggtaccacctcatttccctcctgtgttttacagcgaaactgtacaaaatacttctctatactcattgcctccaaattctctttttcctactttcttgaaatgccttgcatcagtctataaccttcactcttccactcaaatcactagtcaagatagccaagggcctccctatggctaaatccaatagcaattttgctcaacaacactggacacggttggtcaagtcatcctccattttcttcactacattctacattctcctgatttcttcttatccttctacttgacatttacacttaaaaatcaaatgggcatctcaaacttaacatgagctaaactgatgtgtccttaatcttcccctataaagcctgtttttccagcagtctactccatttcagtaaatgacaactctacccttcaagttattcaacctgaaactatgcagtcatcatcaacttctgtcctctcacatcccacatccaattcattggcaaattctgttagatctaccttcaaaatgtatccaaaatatagacacatctcgccacttgcactgctagcatcccgacctgagtcatcaccatattttgcccagattattgcaagagtctcctaactcatctccctgcttctgcccttgctgcttcagtctattcttcacacacatcctgagcaatccgttaaaacttatgtcagagcttgtcactgctctactccacaatctcccatggttcccccaatccctactcagagtaaacatgaaggtcattacaagctgcacctcccccagctctctgacctcatctcttgctactctccccatcttcattccttttcagcatattagccttcttgatgctatcaaataagccagtgtcaccgtaacctcagcaccattgtgcttgctgttactgtttcttaaaatgttcctcctcagcacatcacattgtccattatcttaccaccttccagtctatgctcaagtcaccttctcagtgatcatcaccttcttcatctaaaacttgaagccctctttctgacatttcctatccccctgctctgcattattttcctcctaagtacttctcaccacctgtcacactatataatttacttaattaattgtctgtctctcccactagcatatttttgttcactgctgtgtcttcagtgcctggaaaagtatctggcttatagcaggcattcaataaacatttgtggactgaataaatgaatgcaagatctccccctactttcaaattcaatgactctaacatttcttgggcttctatgcactgtactgggcactgtagaaggcataaaaatatagaagcacagttcctgccctccaggacttacttcctactggcagggtcaggtttgaaagccatgaccctggaattacatggtcttaagttagacttctacctctgccatcaacaagtggtcttgaataatatttcatatctttgagcctcactttcctcatctataaactgtacataacaaaaaaagcctcgaagtttgtggatgagtgaattaaatgagaggatctttgcaaagtggctaacattctacaagcacttaaaaatctgtacctattattatccctcttccatcccctttccccagaatgtttttaactcaattcccttttccctgctcctgagtccttttatgaagactaaccacagaaaagtgactgatctgcaggattcacttagggagagactggccactttcttattcacgttgtcatccattgaacaaaactgagtcaacaccttctccgttggacactggaaatgaatcaacagagcctgtgccctcaaggtacacctaaaaggggctttggataaaatacaccagttgcagagagaatgaagcaggaagaaggttgccagaacaggggcgagactgagaatgcaccatttcaaagaacattcctgaggagaaaccatgcagagaagatagcagagccagcaaagaactcactgccccacaccccccacccccagctccaaaaacacgggaacaaagcctggcggcggctgctaatcagcttgtccgccctggggctgatgagtgggagaggaacagtttggtcagggccactgcaggtgtggaggccacaggagctttcagaagcagggagtcgcttggctgctatgagcacgcagccgccctcgcctctgtcggggctggcccccactttttgtaatgccaggcactgctgggtcccagggagctctgtcactctgatttcgttctctcacacagtgcagctgacttctagtaggtgtaatgtcatggcacagggttagggaaataagaagggtttaatttctcttgagtttgatggcttactgctgctaaaatgtctcaatgagaaacgagttagctgtgggaaggggcagattgctagcaaaggtaggatgggaataaaactttgcagagtggcagagctgcatctggccgtgatgaacatgcgcttgcccatcagtaccaagtgattctctggagaatagagtggtggcagacagctagagagtgggcaaaacccagaaaagcaaaagaggcaggtggcttggtggcactgtgagcctggacccagacacctgatcacaaagcccagctctgccacacgctttatgatcttcagcaagttatttatgttgtcaaaatttgttttatccccagaatgacagtaacagttcttccccacactgctgtcttgagaatgaaagtgccggatgcctgctaagctctccatctagttctctcttcttggtctgtgtaaggattaacacactctctttaagtgtgttgcagcaggagcaaattgcccagctaattcctgcataaaagctgctggggaaaaacagagttcctttggcctgaaccatgagtgtgcctgggatgttagtccaggtctcagagaattgccagcatgcctcatagtggttggtcatctggtttgggcatgacccctagccactccctagttagtctctcatcatgcatttactaagcagctactctgttcctgggctgtgcttttaaagaacttttgtataacccagatatcaccttgagagtgtggcacatcgttgcatgtctttgcctgctgaacatgggatactgggagggagtgtcagggagcactatgccagctctggaccctgtgacagatatagtagcaggagcactggacagggagtcaggaggtctggcttctggtttcactctgctgctagctcgctggggctcatcactgaatttcctgagcctcggaggcatcagaagactgagtcccctctgagactcttctggtttgcatgttctgtgcttctgggtttattctgtgcatcctgttctctaggatggggacatgcatggttggatgagttccatcagtattattttctaagttctcataacagtttgtcagctcttttcctatggcactcgccactgatgaccacacattgcaattatttcaatatctttacctcttatataacactgactctttgaagatacggactcatgcctaattcattggtgcccagcactgtactgtgccctgcacttaagaggctcaagatatatagatatatagatatagatatagatataggtatatacacacacatatatacacataaatatatgtatgtgggtatatatatatacatatgtgtatatatatatatatatatacatatgtatatatatatatatatacacatatgtatatatatatatatatatatatatatatatatatatatatatatagcacatttcccccctttttccaatctgtgtcttcttcagcaaattgtgagtggagatacatatatccattcaatctatacatagactgaatggatcccatagtagttgatgacatccagggaccaggcaccaggctattcctcaggtgcactgattaggacacatcatccattcaaatacctatgaagaaccctgtggtaggtggtgtgggggattcaaagatgaaaggagacattctcactacttccaggagctctggattgagtagaggaaccaaggtctgtcacaaacaactatatatcaatgcagagcagcacatatgagtgtcacaaggcaggaaccaaggtgccaagtagggaaattcagggacagacgatcataaggctttctggaaaaagtggaatccgggttgggccttaaagcatgactggaacttgaacatgtagagatggaagcagttcatgcagggtagagtgcatggagggttgctcaggaaagaacacagaggtcagcatggacagagtgcatacacgcacatggggaataataggagagaatatgagaatcatctcagagcttgaagtaactacaaatctaggttggaggggattattggaggctatgaataccaaaggtctaggagagtacacaggatggtccactggactgtagaacactgcatattaggccttctatttacattcatctaatttccacttgccaatttagttttgcaaatattttataatgtatagtgtaagaacacagtagtacctcagttaatctcaattcagttccatgggcaattagaaaccatggaaagtttttttctttgagacggagtctcgctctgtcacccaggctggggtgcagtggtgccatctcggctcactgcaagctccgcctcccgggttcatgccattctcctgcctcagcctcccgagtagctgggactacaggcgcccgccaccacgcccagctaatggtttgtatttttagtagagatggggtttcaccatgttagccaggatggtctcgatctcctgacctcatgatctgcctgcctcggcctcccaaagagctgggattacaggtgtgagccaccgcacccgtcacatggaaagtttttgagaagagaagcaattttatcagagttgtgctttaggaagatcaatagggcaaggataggcaagataggtgggaggaccaacagatggacatggggttaaggaagccttggagaggtattgcaatggcccaggtgagatgtatggaacagaagtcagaatccaggaattttggtgatggcagcagggacaatggacatagaaaaggtctggatgtgacagatgttgcagaagaacagtggacagaaggaagggacaagaactagtctcagccaactgacagttcaaagctcagcctgtaatgttgggagcataatggtgtcattggcattaacagaaattgtggagtcaggaagaggagctggttttcagggagcaagctaattgaagtttagaacttgaaatcttctagttcaacactcacaatttgctgaagaagaaacagattggaaaaaggggagaaatgcgcttggtctgagaccagtcacgaggtttcctgaatctcatgctgatcttgtttcatgatcttttggctttggttttttacagcattatgttagactgtttaactaaactttctttttattagatcatttagtacagtctgctttccagaaatattttattctgatagttttcatttgatgctagctgaaagagattaatagtacactttggaactgaaaactaccttttaaaatactacttgtcaattaaagtggtacaaagagacaatgcaaaaaagagctttagaaataaattaatgaagaacagtgccatattattcagtcaaatcaaagtagagaatgaagagaaccaaaacagaacaattccatggaaaatagagagttttaaaaagaagagaagatgaaatgttgcagagaggccaaagatgagacagtctaaaaagagatgatcacgtctgtgaccttcaacaaagcagtttcagaggtaatgggctaggatccaatccgaatgggattaaggagatgaggaggctaatctggtctgtttggagaaatttgaaaggaaaggggagaaggatgggccagtagatctggtagacagcaatttctttggaatagtggacatttaacatacttgcaggtaaatgaaaagaaaatgctggagatgcaatcagagccagcgaggatggaatcaaggatcaaggtgggtgggttacaattggagaagaggggctgggcatggtgcctcacgccagtaatcccagcactttgggaagccaaggcaggcagatcacttgaggtcagtagttcaagaccagcctggccaacaaggtgaaaccccatctctgctaaaaatacaaaaatagccgggcatggtggcacgtgcctgtaatcccagctacttgggaggaggctgaggcgtgaggatcacttgaactaaggaggtagatgttgcagtgagctgagatcgtgccactacactccagcctgggtgacagagcaaggctctatctcaaaaaaaaaaaaaaagaaagaaagaaagaaagaaagaaagaaagaaagaaagaaagaaagaaagaaagaaagaaagaaagaaagagaaaagaagaaaaaaagaaaagagaggaggaagaaaagattttgttattgtatattaggaaaaaggaggaggatgtgggaggaagggacattctgaggcaatgaagttatagaggcagagagagacagaaagagtgtgaaataaagagacacagagactcggggacagaaaaggaacagagagatgggtagctgtcacaagaaatgtgagtccaccatttgcttggagttcccctaatctggtaagagcctctgtccagctgaatcagacttccttcactctgcaaaggagacggatagaacagccaagcctggtgctaaacagaaatttatttgtgagcccctcagtggggtggggaggccattactcgcttttaaggccaagattttgaactcaaacttgtttatacacatgtaagccagtctctggttctgggacgtctcccagatctcccagaacagacaaggggttaaatgctaccaacattttgatgggtacatcaagtaggctcctgcaaagggattttattctcatggctgctattattcacaaaagcctgcacagcagatctcagagtagtgcttcctcaaatgatttccaggagcatctgccgatttgatgaagaatctgatgccatcaaagcacaagccagtgatgactcactgcaaactgttgttgttgagtgtttgctgagtgcagcagccctttctggcatagctgctcccagcctgggaccagaagccaggcggtactgggagagacacagcaggaagagggtctagtttttggcacatctcttggttctaccttctgtccttggcttcctgctcttctcctggtgcctaaaaccttcacaaggacatgttttgagaagcagctgagccagaaacacacacccacccttgttatttgagggtttttccagggaagatcaggactatgaaagtcatgaaggatggagcctgttcttttctcttccaggtctttcctactttctgagacctgaatactcaggcatcacatccgtcatggtacaagagggaaaccaagataccacagaagaactatttctttgcatcatattttcaactgcatccttcttcatcttaactaggattctagggcacagatcttgtccctgctcattagagccacatccctcacacaggcctggactaaggcagagccctgcactttggcctccactcccaaggctcactctccaacatgtccctttttatctaaatttacataatatcatttcttattacaggagcctgccctggttctgtgccccaccaagccccaatatgcaactgcaacattttctctctcttacacccatcccctgcaccctgtgcctctcattgtctatcacttccctggccttttcattcctgtccccatcagctcctccatgtcctactgcctccctttccattcctttcacctgccagcttttctattccttttccttctctcttcctctctgtccctttgcttctctccactgactttgcccttttgccccttctcagccgattagctatgatgtcttcaagctgttcatgagggcgtacctggaggtggaccttccccagccactgagcactcacctcttcctggccttcagccagaagcccagacacgagacctctgaccacccgacggagggagccagcaacagtgaggccaacagcgcaggtacacagagctttccccaagatgggaagaccttgcgcagctctcatcccctgccacagccacagactgcattcctagagggtcccctgaacatagtaactgccccaacggtgcgaacatgaaccaagggacagggacgcctttcctcatagtgccttacgggaagccctgatgaacctctcagcaagaggaataaacaggaggcataattcctgccactatggatcaaagagcaggatggggaaagaggagacacaaaataatgtatggtgggggaagagagccttcagcaaaggctgacggtccacggatggagcacattcagcttctgtgtccaggctgggactagcttggaagtgttagaggagagggaagccatgatccctgtcttcctggagcttgggctataatgggggagacacagccaatcccaataagcgagcatgaacccagctgacacataaccccgagacacagacacaatcaaggcaaaccaggtcccatggggatgtcctgtacctgcccttccaagaagctagagggcctgggttggtctttaaatcttcttttttttcctcagatactaatatacagaatgcagataatgccaccaaagcagacgaggcctgtgcccctgatactggtaagtctttggaatataagacttgtgggaaaagtagggaatacctcatccttggggagaagtggggaaacctaaccaacagtgctgtcttcatataattgtgcaatcttatgcagatctggtcctcctgtggccttcagaacctccatctctggggctcctgtcatttgaatgttctgggattctgaggctgggtaaaggtttttgcttcacttgccctagaacagagcaggtcaggacttgggacagcttgctagatgtttatctctgatatgtctgcctgcccagaaaaagtggagagccttctcaggggaagtgtgtgtgtgtgtgtgtgtgtgtgtgtgtgtgtgtgagagagacagacagacagacagagagaggtggctgtggctgtaaggctgaggtgcagatgactctaccagtggatgtctggagaggaacagagcaagagggtaaaaatgtgcccttgttgacttccaacaacatatatacactattttgaataagttgaggagttgctaataagttagcaaaggaagccagctcaaatggtcttgaagatatatttgccaggcatctgctcattacacatttcatctaagcttcacaatcacaccactttacacatgagaaactgaggccttaagagattatataccactggtgtgacctgtggagccagggattcaatccagaatcatccaacctcaaaactcctgcagtctttcctatagagagagaggacacagtggtcctggtggtgtggttggttcctgtggaatgagcaaggctgcactctcagcggagctgctgtagtggtgcctgctgcccataggcccactgttgggctgtgagagatgtggaatcttccctgacacatttatcaatgggaagccattcctctctgctgttggctggccagcccaaggccagaagctcctacaaaaatgagaggtgaaggttaccatacttaatttctgttctcatattcaatacaaatgtcctgagtactatcaactcaagttggatcaggcaacagagcatgttgcttaaggagccaggatgcctgggtttgattcccagagccaacactacctagctctgtaaccgtgggcatgtttgaacaacgtctctgtgcctcagtgtccctaagtgagataacaaatgttcttatgaaggttaagtgagttagatatgttaacgcttagaacagtgcctggcacacagtaaatgtttgataaatattagcatttattattcaggccaccttccagaagtatactttattcttttcttttttttttttttgtctgagataaggtcttgctctgtcccccaggctggagtgcagtggtacaatctcagcctactgcagcctcgagctcccaggttcaagctattcttgtgcgtcagcctcctgagtagctgggattacaagagtgtgctgccacgcctggctaatttttgtacttttttagtacagacagggttttgccatcttggccaggctggtctcgaactcctgacctcaagtgatccacccaaaagcgctgggattacaggcatgagccaccacacccagcacagaagtatactctattcttaactcagtatggtctgccattatctccttcagcctgcaacctcagtctccaagtgtgtcacctgggcatcctcttcccatgaaaggtctctcatgggctttctttctcccaggttgttcctgaagctttcaatacaaagactcagagagtcagaccttttttttttttttttttttttactgtgcattatcattttattgaaaagctttatggatatccaaaggtgaattccagctcttaggatatgcccaggggaaaaagaatgcagtattattattattattattactattattattattattattattattttgagacggagtctcgctctgtcaccaggctgaagtgcagtggcacaatctcagctccctgagacctccgcctccctggttcaagtgattcttgagcctcagtctctcgagtagctgggactacaggcacgtgccaccacacccggctaattcttggtatttttagtagaaacaggctttcaccatgttggccaggatgatctcgatctcctgacctcgtgatctgcccacctcggcctcccaaagtgctgggattataggcgtgagccaccccgcccagcctatattttaaatgtatataaaacaagatagattagaggtactacagctgaaggagaaggggaactaattgcaacagggaccttgaagagagagtttcttcaatgtagttctaatcttttctcctgtcacagcaaaaagagaaactggaaggattatcgagttttcagtgtttaactgaggactggtgagataaacaggtcatgatagatggaaagcagagcatggttggggaaaaacagttacccctggatcataagctcagcaaactccatgcacagagcaccagaaagcaaggatgaggagcagctgtgccttcccgaaggcttcagggacagcagcaggccaagactccacaaaattgctggctcgtccatgccctgcccagcacgccactcagccatgctagtccatagccccttggtgaaatggacgtaaggcacagataactcttatatcttctatggactagaggaggcatattcaggcatctgtgtaaggcacagataactcttatatcttctatggactagaggaggcatattcaggcatagatcattctcatactagggaggaaagtgtgaaactaggagctctgagattttaaactcccagcaagaaactcagtggtaaaaagcatcctgccccaaattatttacctagagacttttttttttttttttttttgagacagagtttcactcttgttgcccaggctggagtgcaatggtgcaatctcagctcaccacaacctctgcctcccgagttcaagcaattctcctgtctcagcctcctgagtagctgggattacaggtgcatgccatcatggccaggctaatttttctttttttgtagagacagggtttattttatctggaacttcaagaggaacctagaagaagatacaattcattcactgaggttccaaattgtctgagcaggttgtgttttagtggctaatgtttctgaggtaccaaggaagaacttattggggatatgtcattttatgtgatatttgagaaaagatgatcaatgatgataacggaaattagctgacttatttaagacctccatgcgtatttgcaatagttgtatcattctgggactaaaagagaaacttccagagatttcctcctggagaagtgattttgtcatgtaccattttccttgtgtatgggaaaaatcagccccctatagtaaaatcatgaaagggcaattatctgactcttggcccaaggaggtatacagcatttttttatcttcttttgacacttgagatttaagggaaaaaaaccttttcctggtaggccctcttccacagatgtcttaattagatgtccctgttcaccagaaacaagaattataggaccaggcagtcaccacagagaggggcctctgccggcaaggaagagccaagccctggactcaccttcaatcaggccatctgctgaaaagaccagccttttcctgttgcccaggtggaagccagggaaagagcttagattcttatttcatgtggcctgtctaggcctatcagatcagtctccaagctcagatctagcaaagcccacttcattcccagagccataaagacagaagagcagggctttcagggtccagacttcggctcggaggcctgagcaatctatcactgtcagagtgtcagctcaggaaaggctgagcccacctttcccttcatgaaggcccaggactaactgggatgaacaaggagaacttcagtgtcctggtgtttcgttagtttctcaggctgtcgagatgtttcagcgacttggaatattgaaatctcaaggaaagtcccccagtattttgtgttagtttttccaaattataaaagtaatacactcacattgtaagaaatttgaaggacacaaaaaaataaagaaacaacaaagatcagtggtgtcaagggtcaggggaagggaaggatgaataggcaaagcaccgaggatttttagggcagcgaaactactctgtatactataatggtgaatgcatgtcattgtacatttgcccaaacccacagaatgtagaacaccaagagtgaaccctaatgcaaattatagacttcaggagataatgatgtgttgatgtattcatcagctgtaacaaatgtaccactctggtgggggagtgaggcatggtaggttatgcatgtgtagggaagcagggtgtgtgaaaaacctctggaccctcttctagttttactctgaattttacagtgctctaaaaaatgtgtttttaaaaaagcacaataaaatcatccataattttaccaatgcaattacatgtgtgtgtgtgtaatctccttgtagatttttctataatttttttacagaattgggatcagactgtattgtatagataatctgggaccgagtttcttctttttttttttgagatggagtctcgctctgttgcccaggctggagtgcagtggcacgatcgcagttcactgcaacctctgcctcccgacctctgcctcccgcgttcaagtgattctcctgcctcagcctcctgggtagctgggattacaggcacccgccaccacgcccagctaatttttgtatttttagtagagacagtgtttcaccatgttggccaggctggtctccaactcctgacctcaggtgatccacccacctcggcctcccaaagtgctgggattacaggtatgagccaccgtgcccggccttgggacccagttttgttcttcacttagttaagtcatttacttgaatgatttctgtaattcaagactttgggtaaacatcagttttaatgcaatcccctctttaaacagatgagaaaactgaggttgagtgtggtggagtaagcctgcttgtgttaaatcacacacacatactttgtgtgttaaatcacacacaactgaacacaaactcagcggtggaatcacggtcttctgctgcctggtctggtgctcttcccactatgccacactgccccactgaaagggaacaagtaacacagataccaagggagaaagtggaacaagtcaggtctgcccaagagccgtcacatgaaagggtttaggacatggcaccaggacaggacctctgtgatccggaagagggtgttggcattttttactggtggtacctgagggtcgtactcagatggccataggtcagggctatttcatataaagcagaatgaagaggaaggacactaatgagacagtgtcagtgcctctcagccttcctggacccctgcatctctatgacaggagtgagcagtagacttcagtgaaaactagagaaatggttcaagatccaaggattgagttgtaaattggcaaaaaattgcatgttttaagtgtataattaataagttttgacacacgtatatacctgtaaaactagtaccacaattaatatgatgaacatacccatcatctctaaaagttttctttgtaatcccttttctccaccctccttacccgcccacccttcatccccatacaactactgatctgctttctgccatatatattaaattacattgtctagattttatataaatgttatcatacactctctactcttttgggtctgccttttttcactccatgtaataattttgagatttatccattttgtatatatcaatagttcacatattttagttgctgattagtgttttaatacatagatattccacaatttgttcgtctgttaacctactgatggacatctagattgcttccaatttataattatcataaataaaaatgttataaatattcttgtgctttaatgatgttgagtatcttttcatgtacttaattgtttatttggtcttatttaatttctttttacatattatgagcctcaatttgctaaaatattaagaacgtttgcctctgtgttcataagggatattgatttgcatgttcatgtcttatcatgtcattgtctgtttttggctttagagtaatgctggcctcaccaaaagggttgcgtaggattccctcctcttaaattttctggaagaatttgtatagaatttatggtgcctcttcactaaatgttgagtactggattttcacattcctacaaagtcctgagctttgtttttaggtacagttaggttacttggaaacagtctgatctttttggatctatcttttaagcttcactggacaggaccagaaaggcatttactcactactgagaaaaaatgtttctgaatactctatcaatgattcacgaattatggggggtttctaccctggttggtgggaataggcattactcctggttctctccagggattattcgctctaatcctagttctttccccagccttagccttaggtgttttccttccacaagtgtgctaattactactcagctgaataattgaagggaactctctgctgttactcaaaggggaccttctacacacattcagagctagctctctgtgcataccctcctctccagtgcctgctctgtgaatcctagccactgtgggctccagattccagcttcacctccactcagagagacttccagggttggcctggcttccccttctctgtgctgcggcctagaagctctttccaaacagtctgatgtggcagttgtaggagtcatctcatcttctcagagatcagtgtttggtcctccctgataatataatgtcctatgaaccattgtttcatacattttgtccagttttgtcactgttttaggtgagagggtaaatctggtctctgttagcccattttagtcaaggtagaagtcactgatagagttttaattgatgaataatatgaggacctagcaataactttgggtgtaatgcactacacagtacaaaggcctgttcccatgttttcctccagtgacaatcttaatacttcattaaatatgtaattttattacaacctcccctatctcactatccctgtctttatctcatcctattgtattttcatctctacttgccaaaccctgaggctttctgcttttgtataatagaggtgatatcttcttgcatcccgctaagggccttgtccagtagaaaattacttttgaaaatctggtcttctgagacctcaggatgaagctttctttccttactttgcagccacgtttcctaggctccatcttggtttcttcatgaggccctctgtaatatacaaattgtgtcagtgacctttggtttctcctattgtccatctggatgatggttaactccctcctcagacccacaactgaatccctggaacctggaaggctttcatctagcacagccctgcttgcctaaaatggaatattcactcccattgcttggttatttgtttctccgaatgaagagtgtacaggtaacattgccttcctcaacagacattacgatcaaggctgtctctcccactgcctctaccttcagtactttgttacttggtggtataatataacaacacctaaaacattggattttccactgtccatcttccctttgttccctggctagttgttttctgtgagttgtacactcctagtagatattaagagatcatttctgatgagcatggaggtagagacggaagacagcactcaaagtgtctcaaaaaatagaattcacacaggaaaacaggggtgcccagttttcttgttagtaatagagcttatatttctgaaccacaggacagagtgtggaagagacaaagtgttttcctaccttagaaaggagaaattttaaagggaaaacttaccccattcttgtggtacaataatccactttctgcattttcttcatccaaattagacttgcagttagtttgagttcttcctagtttctggagattcgttaattatcaatcccggttttctcttttgaatattcatcctttatgtgtctttaaatgtgtttgaaaagaaaattgcaaggtctattgagaaatgactgttggccatttaccattttgaaatcccagccaaaattacttctataagttgggtatgttcccaaaaaagtaggccaaatgacatttacctgttgattattgatattaccaataatcactatcatcttttctgaatattcagagtatagatgaatttcctgcaaggaaatagactcttaaaggggtcagcatgggatcccttcagagaatatgaactccacaagttggatttctagggccactaatttggtcacatctatgtaaccaaagcttttgaagacacttctacaaaattcttgcctctaccatgaaaaggatggggtaacaaagaggggttaatatttactaaacagaaaatgtccttggatgttttccttttgttcatcgcagaatcaaatatggctgagaagcaagcaccagctgaagaccaagtggctgcgacccccctggaaccccccgtccctcggtcttcaagctcggaatccccagtggtatacctgaaggatgttgtgtgctacctgtccctgctggagacggggaggcctcaggataagctggagtgtaagtgctcaccctgtcaaggggcttcagctttttcctagagaaggatctggggttctatccattattcctaaacacactggagattgagttgatatcacggatatgcgtcccgcctctttggggaggtttctttgtcctgttaccaaaagtgatatgaacaactcctagaatccaccctgggacatattgccagttgtgtatcacatgggaagggcatctgaaacccaggtattgagaaccagaatctggaaagggaaggggtcccatcaagtggtcaagacttccttgctttgctggcaggacttcctgaaagcctttactcagaaaactgctacctcctcttaatagattttttaaagaaagatattcaacatctgtcctccttcccctattctgtgcccaggcaactctttaactatgaggaaatattcttttcttgagatctcatcaacctctgtcttgataagcctttgtccatttctctacctatgcccccccgccaccccaagattcttggcctctagagaacgagggggccagttaattaaaggagttgagctcagtttcgtggtgctactaaagtaggttttaaaaacatgtcttcaggaggagagtaagagctgggagcagaaagttcacagtggctgaaacagcctgcagtcttgtagatgattcagtccagtgatggtttccctggcttctgtgagcctacagacatacttctaaaaaaataggagatgacaggaccttgttaaaaaatctgtattgtctttgcttctcttgggaacttaagtagacagtaaggggaaaaaaatgtacatgttacagccaaagtcaaaattccagttaataataagactagtcaacaaaacttaaacataagcaagggaagtctgccaaaggctaattcttgccaaaaacaaaatgaaacagtttgctcattagctgagcttaaaatctctcccataggtttgaagtgttaacaattgcaagtcttaagtgctaatttggtggcaaatgtagcagatttctgttttcttctagctaatgttaaaagtgaaacatcaaattatttccagcatttagctggattttgagtttcaggcattgtatttgttagtgactaccaaagagaaggtgacagatttttttatattaatgactctccaactgagtcttataatgaccatgcaaagaaatgttaaaactttttattacagaaaatttcaaagataaaagtagagagtacagtgaacatctgtggccccatcatccagtttcaacaattatcaactcatggtcaatcttgttgtgtttatacttcccaccattccctctgcctcagagtatcttgaagcaaattccaggcatcatataatctgtaaatatttcagtatgtacctctaaaatcgcagactcttcttcttaaatataacctcaataccatcattacagctaaagaaaatgattccttttgctattatcaaatagtcagtattcacatttttccaattatcctagatatttttaattgtttgtttgaatcaggatccgagtaaaattcatacatcaccactggttattatgtctctttactctcttttaatcttttggatccctctccatcttttgctaattttttcctttatttatttatttatttatttattttgagatggagttttgctcttgttgcccaagctagagtgcagtggcgtgatctctgctcactgcaacctccacctcccaggttcaagtgattcttctgcctcagtctcccaagtagctgggattacaggtgcccgccgctacgcccagctactttttgtatttttggtagatacggagtctcaccatgttggccaggctggtctcgaacttctgacctcaggtgatccgcccgccttggcctcccaaattgctgggattacaggtgtgagccatggcacccggcctgcaattttttgttacagaaacttggtcatatagagttttcattttggtttgctttttattaaaccatatcaatttatatccttccttaactttaaggactgaaaacaaattaaacttttctttttaaaaaccaaacatgtattttttgggaataatagcctgaaatcccacacctattgccaatgcaataataacaactatcattgataaacaccttctatttgctaagtactttgaatgcattctcattttaacctcattgtaacctagaaggaaggcacaagaaggttaaaagacttgcccaaggttacactgctaaaataaggatgcttactcaggcctttctagttctattgttcatgcacaataggaccagagagaggtcagcgttggagagtcgcctaggcccagagtcctggaataatgctagcagaaaaggtctgtcctctatgtcattcaaccatctgctgggtgagtcagcagcatacgatgcatgcctctgactgggaccttctgaggaatcacaaagaatcgaaagcccatgaccctacctttaaaggactttgactttgaccagcgatgcacccctgaaaaaaacacaaggtgcagagacattaaaacatctaggaggaaatgatgacacaaggacaacttagcagaaataaggggaccaggctggtacgtgccccaagtggttgcaccgcatcagtcaacgggtgctccgcagagaaagcaggcatgatgaagggttttaaacaatagcaggaaaggccggggagcgcagaggctcacgcctgtaatcccagcactttggcaggccgaggcaggcggatcatctgaggtcgggagtttgagaccagcctgaccaagatggagaaaccccgtctctactaaaaataaaaaattagccgggtgtggtggtgcatgcctgtaatcccagcgactcaggagggtgaggcagaagaatcgcttgaacccgggaggcggaggttgcagtgagccaagatggcgccattgcactccagcctgggcgacaagagtgaaactctgtctcaaaaaaaaaaaaaaaaagaaagaaagaaagaatagcaggaaaatgaagaaatgcttatctctgcttcctgccatgctgacttatgagaccacagacaggatcttttccttttggttgagtaaaacataggtttccaggtcccataagtaaacatgtagtcccttgtccagatttttctcccagatcttccttatcctacatcacttcccagcagttagaacgtgattgaagatgtttctgaatagcgtatttccgaatacctttagaaaaaggaaaagatggcttccgtaataactaccccatagcattattgaggattaagcaataatgagaaagtctataggacagtaccttgtatatgttaaatgccatatataaatgttcatttgaaaaggaaaataaaaattagtaacatctgttgagtgctttctatgttctaagcccagttgatttggcctatcagttacacattaatcttcataataatcctaggagaaaccaactattattctctccactttatagataaggaagctgagctcaaagaagttaagtaacttgttgggcaccccccagaagtggcagggcagtcctaggatttaaatctgcctaactctacactttctatgctcaatagaagaaaaattctggtgcctctgccccacccccagctgggcatttgctttaggttgtgttctagtgacgctgaaatgtgttcatgctccccagggaattacactcatgacctggacttcatcagccacataggtattgcttagacaggtccagaagccaggtggttctcctcccttggcccagcctctctgtaaggaagtcagactctgtgctcagagggagggagagctggctgccataaccttcgtcacagtggtgacagaactaatctaaaaacctggcagcatcaaaacttcagccatccgcgcttcttagaggacacctcaaggcttacctctgtgtttcttacagtcatgtttcgcctctatgattcagatgagaacggtctcctggaccaagcggtaagttctcactctaaatatccctcatggacctgagaaaggctgggggagcagggagcaagcagaggaagaatctgaaaatgttcagttccgtctttgtagtaatagcaatgtctcgatgcaggctgaggaaatccgactaggacctctccacccgctatttccaaagggccggccttgcagagcgtgaatgccaacttaccttttcgctctagaagcctgggatcatcaaatctcaggatggagggatgctttagcatgtcacctagtttaacttcccattcagttcacaagcgcctcctgcaatttcctgcaggagtcctgaggccaagaggagagggcgggggaggcaacaagaccaagggaaaagggcacgaggaaggaggctgctggttactgttgatgtgcaaggaaggaggctgctggttactgctgatttcagaggaaggaggctgctggtcactgctgatgtgctttgccgtcacccttggctgcctctcctactccagggcactagcctaggagtctggttctgtctgctctaagtacatgttcccatcccattgcacctgagaaagcctgagactcaccctcaccccttcaggaacaggcaaggatcgatcaaggctcgtggagtaaaaggaagaatggaaagagaagaaggcaaacagagtcagacaggccctgttgtcctgactgtcaatgtcagagatagggctcattaacaggaaggccctgaggttgagatgcatggggctgagtcagaccagaggaaggaaggaagggaagaagtccactagacaaactgaatcatcccaattccctctaaaccccagggtgcctctatgggatccctccagctacattgcaatgctgcgggttgggtcatttgaggaaacatccagagaatcacagattctcaagcatttggtcaacacatatttactgagtatctgcattatgtcaggcactcttctaagcactgagggtatggcagtgtagccaactgacaaagttccatgccctcatgaagctttcattctagtccaagcacagacactaagcagcatagtaaaaacatgtgtcaggtagggatgggtgctgagaagaaaaataaaggaaaggaaatgttggaagaagttgaagctttagcgagggtcgccgaggaaggcctctctaggagggggcatctgaacagaggcatgaagaaggtgagggagtaattctaggggaagagccttccaggagaaagaacagtgagtgcgagggtcctgagggtccctaggatgttagaagattcactccgggccagtgtgaatggagcagaatgagtaaacagatgagatcacagtgaggaagtaataggggatgagatcagagaagtcatgggatgggggtaggagagtggggagtttgcaaatcttattaaacgttataggtgattaatagtgtttatctttggccaggcgagtgactcttgcctgtaaccccagcactttgggaggcgggcagatcacgaggtcaggagttcgagcccagcctggccaatatggtgaaaccccgtttctactaaaaatacaaaaattagccgggcatgttggcacacacctgtagtcccagctactcaggaggctgaggcaggagaattgcttgaaccctggaggtggaggttgcagtgagccaagatcacgccacttactccagcctgggcgacagagggagactccgtctcaaaaaaattaaaaaaaaaaagtgtatcttttactccagagaaatggagaaccattgacgatcttgagcagaggagtgatgtgattgacttatgttttaacagaatcactgtactctgggtgcagtagttcaagcctataatcccagtactttgggaagctgaggtgggcggatcaccagaggtcaggagtttgagaccagcctagccaacatggcaaaaccccgtctctactaaaaatacaaaagaaattatccgggtgtggtggcgggcgcctgtagtcccagctactcgggaggctgagatgggagaatcacttgaacccaggaggtggaggttgccatgagccgagatggcgccactgcactccagcctgggtgacagagggaatgcaagcagggatactggttaggaggccgttgaaataatcaaggcatgaaatggtgtagacttgtacagggtagaatcattgcaggtagtaagaagttgttaaattccagatacgttttaaaggtaatattggaagactgaagcaaatctcaaaagagttatctgattcaacctttcaccggaatccctgtcatatggactcctaccttaagacagccattccactgctgggggtgactgctggagagggcttccttctcgaacacaggcactcctctttgtggtggggaatcgttttcaactcaaaacctgcttctgctccccttctcccccaatccaacagggaggccaaaataagccagtcctcaactccttccttccctgcatccctctctgcttccttctgtcccccatacctggccaggacaaatggaatacctatcccatacaataggccttcgagtatttgaaggtgctatcacatctcccctaaaatcttctccaagctaaaatttctctattcctacactggttctcataaggcaggcttaaatatccactttggacaagctctggtttgtaaatgccattcctggaatgtggcacagaacagaatccgtcccctatgattctttaagtatccaaatgtggcctgaccaggaagacctcaggggaactttttcttttttaaatctgccaactctgcttctattttcatagcccaagactgagtccaattcttggttcctgaaatacgttttctctttaaatcttggacccaaccagagattcacaagctcttttcttttggaacttctgccaaaacctttccccacctttgtgcccactttcttaccctcatctactggcctatcctgtagttttgcaatggattgttttttaacttaaataaaatacaattttttaaaatccctgctgggttttagcttgctatttggacccggcattctatctggcagaggtaacacttttgaaccttgcttcagtctaccaacatgtcctcccaaagcaatcttactgtgaacatcttaactggtgcctaaatggtgctaactttgacaccaaatgcctcttcagtctggtgtgtttcagcggggctctcagaacactgactcattggcagccaacaattctgtgaggttttagatggagcctggcctcagtaccaaaaggctcagtcatcaagtaaacatattcctcatgagtttcctgttcacggactcctgggggctgggctaagggctggaccatggtaaaaaggaaacagaggagataacaaaaggaatcaaaatcatggtacctgagctgagacacacacagtaaccctccatgcaagagaaactggcctcgagctgagagatggatcccaagttgctacagctgtggggatgagtgataagaagtgacaggagaaatctgccttgatttgtaagtatttgtggaagctataatcacaaagagggataaaaataggagtgctttctatgctttccaagttaaagcacagaataagggaaggaaggtgggtccaggaggaagtcagtgtttatgagctttttgcatacctccagcttatgcatgctctgtgcttctcgtgagctttgtggtcgagacagaaataaactgagctcctcacaaaatggcagttactgcaccagcttcttctcttgccctgccctgtccctcttcccactgggcttaattttgagttcggctcttaatgacacatctctggttgtctccttttgatattttctccctttgctattttctaggagatggattgcattgtcaaccaaatgctgcatattgcccagtacctggagtgggatcccacagagctgaggcctgtgagtttctataaggatggggtggctttggagtgagcttctaagacgggagggggacacactcaagacatgaatgagtgttaaccctgcaggtgctcccagactcatcttcttataggcagcttctttggagtcctgcactttacctcctacctctctgataggaaaaatgtaggcagcaggaaaacgtgcagacataactgaaataaccatgctaatcttttcaccagaactaaaatgttatagcagaaattcatcagtcaaagaatttagagagaactgtagagatttctattagaaagaattgtagagatcttcctcaatcaccagataatatgaattataagaataattacatttgggggctcctatgtgtcaggtattttgttattcactttacattcattttctctaatccctgctacagtgccacaaacacaacaatattatttccatttttacagataagcaaaccagagcccacagagtcagggtgactggcccaaggcccaagggcagagccagacctggaagcctggcctcctcactcccagtctgctctattcacacttaacaggaggggaaaggggtaaaacacaaaccagataatgcaagatgaacaagacagcagaggcagaaggcaggtagacatgtcgatgatgaaaatggacaatgattgctctttggattccacagatattgaaggagatgctgcaagggatggactacgaccgggacggctttgtgtctctacaggaatgggtccatggagggatgaccaccatcccattgctggtcctcctggggatggatgactctgtaagtcaacaagctggagttcagagatctcttgccattcaggaacattgggcttcatgttaatatcaacatatcactttggcttctgctccagactgcccaacagacgtgccatgaccagccccaaagtcctctctatttacattattttgtatccattagtgcctgaagtatattcatttgacagacatttactacattattactactttaaaaatactgttctgcatgctgtgagggaatacagacacattatctgcctgcaagaaccttatactcaaccaggcaaagggccacaaacttcaaagaagaattctgtcttttcaacaaattaggtttaaaaatgctaagagaattggggaaggaagggtgagaggaaagaacgaagggagagaggaaaaaatacggatctgttgtgggggtggcttccattagtggtatcttatttaataatcaaaacaaccagataaggtaaatatttttatcccaatttatacagatggaaaactgaggttctgaccctaaggagcaaaaggaggagtgaggatttgtctctgacaccaaagatgttgcactttgtaatatcccacacatgagagttaggccagtgggaagaaaccttggaaggtgttgacttgtccctgaagaatgcatgagattttgatgtcccattcttgagaataaagagcaggtggccttaaagacctagagagagtttatggcttggagaacagcttgattaaaaacacaaatgaaagaaagttctgggtgtgttaggcaaatctcccatttgatcagagtagggcatatgtgtacaggcttaatgtgaaactgattgttatatataccttcatctgacccagttactgtattctccacctatttaccaagtgaactcacttccatgcatgaggtagggaagactaaaactagtaggagcacaaatggtgacattaagcgtttactagtcacaccagttgtgtgacaacactactttgagattacagatctcaaagattacacctctttgagactattccatagagaggaacagggcagcaagtgcagctgggtgagcctctagctgaccaagttgcctataatatcttcatttcatagctctgcaattcaggactaaagctgagcccccatttctgaagctcaagaactatgaatcttgcaatcatttcatagcatgtccagtgctttccaagctctaaggagaaatcaaggaaccaggatctacatgacccccttcttattccttagaaccctagaaagtcaagctggaaaagatctttgtggtccctggttgatcccctttcttttacaaactgagacccagagaaatgaaggaacttgcccaaggacatccaccgaactagcaccagagatcatcccccttactcgctcacatcacgcctctcacccaatgatcccttgccaagaagctttatgtacaagaacccatgtgatccaggaactggaagggctcagataagttagatatgctttctgctgactttactcacttaagattatactcaagacaaaatggaagttctgttccaaaacaccattttttttttctcatttagggaataaagatgggacattttagttacagggaatcaatttccattttctgttctactttggacttgctgaggttcaaaataccaccaactctttgcatggaaaagacccgctgtcttgtggcaggaggaaggagagcccatctacttcctcagcattctcccaaatgtctcccctaaatgccagatcagccttgtagaaaactctcatttatatcaggaaagtggccaatgcaagtttagttttattaatcaagagttttatgcacttatttttaaatatgtactttaaaagtttttaacacttactatttggggttttggagaaagcccccatcaatgtcttaaaagtccattgcttcttgggctttttcaaaacccacatacaaccactgaaaagtctggggaatcactgaatgagatatttgcaaaacagactctctcccaggaaaatcgtagcagcagcataaaacctggtgagcacgaggaaggctacgcccacgttctgcagccaccatcatgtggaaaggaaagagccacatgatggtgctataacccaagcagaaacgttactttatcccaagtcacggtccatgcacttcttatatccataaaaatagtagctgagaaagggggatgagctaactgacttagctactagaggtgttttcagatacactgacaatcctttgggctccacgaagaagtctgctgaagagtgctatcattttccttctacccatacaggaaaaccctggcttgtgaggtagaggagcaggatggaaagagcatgggctctggccagcaaaagacccaagtctgactactcattcagtccctcattatctatgtgggcttgggctagttaccgaacttctccaaatctctgtttctcatttctagaatgggaacaaatctacctccttccacgtcaacaaacactttttagtttattttgtgtcttccggcatctggaatggaataagaatttaatgaaagtttgaatttacaatatgtcaggcattgaactagaagctttacttacatgatgtcatttaattcttacaaaaagcccttgaggtagatgttggtcaaacgaataaatgaatgaatcaatcttttgatgaatcattatcagtttgtgaatgcatttactaaagtggagaccgttagataagagggttttaattctataaaactcatgtcctggaagaagcagggtttgaggtaatgagaagaaaatagcttctctggcccagaggagaaagccagcatttggaaaagaatgtgagctcctctggagatcataaaagaagcctgggcacaggctgaggtctggttgcagtgaccagcccaaatgcatacgcaccccagaagtaagaattacatttgagtcccgcatattggacactacatccatgaccatcgatcctcatcaccttaccgtagcttttactgatcatgaaaccagcccaagagtgttactcttgtaatggagcctatgagaaaagttcagggatagcacatgcaggagggacattcctcaagctgtgctgtgttcccctgggatgggatgtgggagatgtgggtgtcactgtgtgaggcttggtgtacctagtagatgcagatgatttcacttctgaacaaagtcaggaggtgatggtctaaccctttctctgtctgtcttttcactattttttctgcgtaccgaaagttgataggagaaatacattgtttttactaaactctttcatcttgattatcacactagtacatgcacactgtaaaacatttggaacacacagcagaaagtagaaatcagagaatacaataaatccatattgctgccagctatagccaacctctgttaacaggttaatgaaattacttcccatcaaagatctattatataaaactgaaatcataacatatcatcgaaatggcattctgttttttcgcttaacattgtatcatgagcacattcccatgccattagatagtcttataaatatctttttgattgccacctaacattacatcagacggatgtactatcattagccttttggtaattatgagacctttaggatatttccagcttttcattattttaaataatgctgggttaagcatctggcagggcacaaaaaggctcatctgccttttaaaaattatttatttaggataaagtcgaaaaggagatattggtaagtcaaaggttgtaaacatttaaaggagatagatagatagatgatagataatagatagatagatagatagatagatagatagatagatagatagatagatcagattgttgttcagtttatgcttctgccagccatgcgggagaggatttattttatcccacacacacatgcttccattcagatgtttcttgcttttaatatttgctaatttttaaaacacacacacaaaaattttgtttttatttgtatttaaaacagtaaaaaatatcaataactcatcttctaaatgagatgaaaaggaagaacatgcaagaggcagcccctggcttcctccatctcagggcagccagcttggggtctcacctcctattacccctgcagggctccaagggggatgggcggcacgcctggaccatgaagcacttcaagaaaccaacctactgcaacttctgccatatcatgctcatgggcgtccgcaagcaaggcctgtgctgcacttgtgagtaaatttccttcaaacctcttcccccaggcactatcttgctctgcgcatggttggttgatccattgcagagaaaatgttggtatttctgcttcccagcttgagggaccacccatattgtcccaacagaaggaataaagcgaggccttcatgtcctgtttttaccctacccaagtccaatggacaggtcttggactatttattattggaggctttttatgagccactgaccccctagaagaaattattaaagtccacaaataatttaaaatttctcatactacttttagttgggttttctagtcaatatttattctgggtatgttcagaggaaacttattttttaaaaattaataagcatttggggccaagtacggtggctcacacctgaaatcccagcactttgggaggcagaagcaggtggattgcttgaggcctgtagtttaagaccggccctgccaacatggagaaaccttgtccctactaaaaatactaaggtgctggaaaggatgtggagaaataggaacacttttacactgttggtgggactgtaaactagttcaaccattgtggaagacagtgtggcgattcctcaaggatctagaactagaaataccatttgacccagccatcccattactgggcatatacccaaaggattataaatcatgctgctataaagacacatgcacacgtatgtttattgtggcactattcacaacagcaaagacttagaaccaacccaaatgtccatcaatgatagattggattaagaaaatgtggcacatatataccatagaatactatgcagccataaaaaaggatgagttcacgtcctttgtagggacatggatgaagctggaaaccatcattctgagcaaactatcgcaagatcataaaaccaaacaccgcatgttctcactcataggtgggaattggacaatgagaacacttggacacagagtggggaacatcacacactggggcctgtcgtggggtggggggaggggggagggatagcattaggagatatacctaatgtaaatgatgagttaatgggtgtagcacaccaacatggcatatgtatacacatgtaacaaacctgcacattgtgcacatgtaccctagaacttaatgtataataaaaaataaaaataaaaaaataaaaaataaaaatactaaaaaaaaattagctgggcatggtggcatgcgcctgtaatcccagctactcaggaggctgaggtgggaggatcactcgagcccaggaggcagaggttgcggtgagctgagattgcaccactgcactccagcttggatgacggagtgaaaccctgtctcaaaaacaaaaaacaaacaaacaaaaaaagcattttacattctgtaaaggcaataggaattaaaactctacagttgtttcactttttaattcctttagtaaagtcagagtggaaaggtggaaaaaactacaagtggtagaggaaaaagcagagaggaagactggaaagggagacagcaaaaagagatgggggaaaagagtgataaggagtaggaaagaaggggacacagggagcaggaggagaaggcagaggggctgcagcaagaaggcatggcaggcaccagaatatgtgggtgcacagagccctgccgcccgccccgtgatgtggacagcaacactcagcctgaacccaccagacaccggggagctgctgctgcagggaggcccgctggctgtgctccaggctgaagtgctttatccaacatgcacgtgtgaattaggcagcaagtgacctcagccacagaagtcgccttggcagagctgggcccgctgtccacaaagaccaagcatcaacgggctaaagaaggggtccgccaggcctggcgcggtgattcacgccgtaatcccagcactttgggaggccaagacgggtggatcacgaggtcaggagaccaagatcatcttggccaacatggtgaaaccccgtccctactaaaaatacaaaaattagctgggcatggtggcgcatgcttgtaatcccagctactcgggaggctgaggcaggaaaatcacttgaaccagggagtcggaggttgcggtgagccgagattgcatcactgcactccagcctggtgaaagggtgagattctatctcaaaaaaaaaaaaaaaaaaaaaaaaaaggggtacaacagtctccccagcgccagttcaaacccagctcttacccacattttatagatcaatctcattcccattaagttctaggcccgtgggcctctgctgttcacataatggtagtaaaaacaacagcaataatgtgtggaatagctactctgacccagacacgtgatgctttacacaaactatctcatgtactactgcaacaatccctgcaaagagaaagagaaagagaggccgttttcttccctttttacagaaaaccctgaatttcagagaggtaaaacaatttacccaaggtcatgtggattgtcacgggggcctgcctagccttcaaaagccctgaccttggccaggtgcggtggcttacaccagcacttagggaggctgaggcgggtgggtcacctgaggtcaggagttcgagaccagcctggctaacatggtgaaaccccatttctactaaaaatacaaaaaattagccgggcgtggtggtgcacgcctgtaacgcctgtaatcccagcaactcgggaggctgaggcaggagaatcgcttgaacccgggaggcggaggttgcagtgagccgagatcacaccattgcactccagcttgggcaacaagagcgaaacaccatctcaaaacaaaaaaaagccctggcctttctattcattttccaatgtcccgggcatgcaatacagtggcactggcatagccaggaggatgatgccgcacactccccttcaggaaaaagcgcctttctggggatgtgctcctgctgtgttcattgcctgcagaggaaggcagtgaagcaggtggaggtgcagccgcagcagataagcagggtctctgtcctccaagaacaattagagactgttttgaatttccgttaggcaagaccagccccatgtgtcccctgcccctcgccagccacccaaagggaggtacagaccttggctagggtgggagggcagctgggcctttcctacgtggctattcacaagcacctgccttgactttttttcttttcagactgtaaatacactgtccacgaacgctgtgtgtccagaaacattcctggttgtgtcaaaacgtactcaaaagccaaaaggagtggtgaggttggtgacatctactgccttgttctactgcatgcctcatccaggaaacatgtccatcaacatggattcctgggcaggaaggggcactgggagcttcatccagtcccttctctgccttgaggaccacctgtaaaccatcccgttcatccatccatccattcagcaccttcctggtacccactatgtgccaggcaccatgctagggggtacacaggttgtaagagacgctccccagcctgctcaagaactatgctgtctagaaggagagacgggcatgtaagcaaagaacagaatagtgagatgtgtgctacagtaacacagctgtgtggaaggtacagtggaagcacggggcaagttgcacaaaggagctggcattgcagttgtgtcttgaacacaaattgggaggacttcatgaggcatcgaggaggaccagactctccaggcagaggaagcctcatgtgtaaaggcatgagacacggcttattccgggattcatacttagtttggcatagctggggcagaggatgcttaaagggaagtggcaggagatgcactcagaaagtggtgagatctggcctgaagcaggtcttatgaggccagctgagtgagaaaggtgttttctgtgcagccgggggccactgaagagcttcaagcacataaagatgtgatcgaatttgtgaattaggttaatagctctgagtgtgatgtgggagagaaatcaggggagggaaactcttccaatacttgaggtaaaaggcagtactgcgctgagggcccgactggggtgggatccacactcactgctctaggatggtcctgtgctgagggtcccccaggccatgctggttattgggtattttgactgtcacactggctaaaggagagaaaatgaagggagagcttgagaggtaatttggaagtaccaccactaggaccaggacatggtgatggggatgcggaggatgagagaagggaaaaggtagggaatggctcccaggtttctaactcggtcattgggtgacgccattctccaagtctggaaatagacttaccttaaaattagcaggggaagggcacttagccttcctgaaaagggaagattacatggaggagtgtgagtcaggagacagttagccatgagagtggtacccagccctcctgcagaaggactcctggtagagaaaggcacctcctagaatttgtgtgcatgccccatggacactgcatggtctctcgtccacgccttctgcaccaccccatgcacaccctgctccatgtccatgcctttcaccgggacacacggtgtacctgctggacgcaggccctaagcctgcactctggccacctgtcacacagagaacagagtgaggccaatgaggggccagcagggcacactcacaaacttctcagcctgcaggagcaacccagtctttcaccatctcctcagatcccaaagagaatgggtaaggcgatgtggtgttggggaaacagccctggacttggggtcagaagacctggctaggaaaccctacttggccgcttaccagccttggaacctagggccagtcacttaacctctctgaaactttcattttttcctctgcaaaatggaaataataatctcagagcaaattcaattgtggccatgtagatgacagattaattggcaaactgagttctttacaccctcagaagtgcaaggcacaaggtgataagctaccaaccaaacgtgacacatcttccaaagcaataattttgccaaaaacattcttaggggaggccttaagcaacttaattgctaagtaatttaaaacatttattcttggaccaagtgcagtcactcacacctgtaatcccagaactttaggaggctgacaagggccaatagcttgagcccaggagtttgagaccagccggggcaacatggtgagatcctgtctttacaaaaagaagatacaaaaattagcctggtgtggtggcatgtgcctgtagtcccagctacttgggtggctgggctgggaggattgcttgaacctggaggatcgaggctgcagtgagttgtgatcatgccactgcactccagcctgggcgacagagtgagactgtctcaaaaaaaacacgtttattcttatttaatacaaacctggacagaatcacgcagatatttcctgggtttttaataccgtgcttgtggctaggcacttcagggtatgtcccccaccttctcccagagtccatatccacttccttctgttatttgtggtaccatagtgaaaatttttgagtgagaattttggtgagaattccagggggagggaactgagggttcagcctcccagacagtggggctactagccagctgctcttgctttagccgcactgacacacacatacaaaaacaatcccactattcccacctgtttccaagtgcctagcctgccctggtggtctttcctggtcacggagcagatacaaccagctccccaggaaacaggtgtgaaaagcaccaatggaccctcactaacttctttggacttttctctaacttccttctagagtgctttttagtctcggcttcacgttataattacccagagtgctttaaaacatattaatcatgtgccccaccctcaaagactctaatttatttggtctggagtgtcggctgggcattaggatgtctaaaagctcccccaggtacttctaatgggcagctaaagctgaggaaggagaagggcattacccaattgtgggtactcccaaagggccaggactgcaccagggaggcccttcaaaatgtgctatctcattgcattgccccagtaaccccagaggtgggacttcttataccaattcccacaggtcagggacctgagactcagagaggtctaagaactggccaaaggccaccacttcaaagggactccagccagttttgtctgtggcctacccaagccctccagagttcctctgcaccatgctgccttccagaagagggcgcatacaaacacatcactctgcaaggcgttctgcaagacaaacagatggactgccagacaagatgctgctcagaggcctgccttccagggcgattgagctgttcaaaatgtggcaaagcgagcttttaatctactttgattcgcataatggcggttaggcagggaggaaccacatcgtgccattaggcaagccacccaacatccaataagcatcctctaaataggaaacagtccctctggctcccccgcgtcccctcccagatccttctcctccagcccagggccccggggacatggttctgccattttccctggcatcgttcgcttccctcccgcaggtgatgcagcacgcatgggtggaagggaactcctccgtcaagtgtgaccggtgccacaaaagtatcaagtgctaccagagtgtcaccgcgcggcactgcgtgtggtgccggatgacggtgggttggcgcccagggcggccctgcttcttttcaacgtttttttgcccaagctgcagcccaggagcagtgaatatccggccagagggcatgagcaaagccaggggagcgaggctaggaggaccccacagcgcctattcaatgccctcagcctaacgatgctccagtgaattaccaagctgcccagagagagggcacccccgaaccaggggagtgaggactgctgaagaagaagctggccagtccactgtctgtgtggcctggcagctgggatcagcagccccgactatgaacttcttttacctggctatcacctagggccggggacactgacagagtgggagaaaaattggacaacaggagcatcataggagggggtgcctgccctgaaggcacattcctcagagcagccccactgcctgggccaaaggtttggacctgctgccaccagccacagcacatgctagagtccacagccccactagacacccagaatgccactggcagccactgagctggccaacctgcctgtcaaaactcactgccagctcttgtccttctccccaggtatcagcctcaaaatgtaggtttctccaaaccagactgcagaactctcaaaatacaaaggttgaatcacaaggtttactctcagccatccatgagtttgttcatcaacatctccctcctcccagagtctcagggcctggagagcacatatctaagggggctctggaatcaacatggggtgccacactgaagggtcacaggccggctcatgactgtgtcgcttcagtagccatgagcggctcttggcctctttgctcagcccacagcagactttgcacccttaaccacacacacacacgtgcacacacacacacacggcaatactgtcaaagccagcagtgcatcaggatttgggggagcactagacagctcacctctcccccaaacctctccaccttcatgtttgatgtttctttgctcactttcactcactctctttttcatttctccccccagtttcaccgcaaatgtgaattatcaacgttgtgtgacggtggggaactcagagaccacatcttactgcccacctccatatgccccatcacccgggtaagtgctcctgccccggcgagggctgtagcttctccgggttctggtttcagatgtaggcagctttcagacattcacatccttcccagggcttccctgacaactctttgggtttgtgttttcttttctttctttttttactgttattttaggttagagagtacatgggagggtttgttacacaggcagacacgtcttgcgggagtttgttgtgcagattatcttatcacctgggtttttagcccagtgcccagttgttaatcttttctgctcctctctgttgggtttgtgctttcagtatgtgcttgaaagaggtcagcgctgcacagatcagattttgagagaaatcttctctgactaaactgttgccaattgctgaccaccccgagtaccctgaaatgacccagcaaggaaagcacatttgttctaagccttttgcaggcagagcacagcacaaggaacctcagtcaccacctatgcatggccaggctcccaacctccctcatctctgtcaatctccctgccacatccaaacagtatctccctctacttcctgagtttccacttggatgtctcagcctgatttggaaatgaaagcagcaaaattaagctcctttacccccacctggcacgttgtcgcctgtgttgaagactcctctttcaaacaagcgtcaaacacttaattttgccatcttcccatcttaaaaatgttgcaagtcccacccattcctcacatctcactctggacttgaccagctacttctttgtcattaaaaacctgagaaaaaggccagccacggtggctcatgcctgtaatcccggcactttgggaggctgaggcaggcggatcacctgaggtcaggagttttagatcagcctggccacatggtgaaaccccatctctactaaaaatacaaaaattagccaggcgtggtagtgggcacctgtaatcccagctactggggaggctgaggcaggagaattgcttgaacctgggaggtggaggttgcagtgagccaagatcacaccactgcactccagcctgggtgacagagtgagactctgtctcaaaaataaaaataaaaaaccctgaaaaataccaacacattggaaaatcatttagcaatatttactgtattggaaatatacaaactccataactcaaaaattctcctccagtgcatctacctggaaaatacaagcatttattccaccaaaagacatgcacaagaatgctcatagcagctttattcataacagttaaaaactggaaacaagttaaatgaccattaacaggagaatagatgaataaattgaggcatatcggcatctggcattcatagaatgggaaactacattgcaatggaaaagaacaaactatgcatagagtaaaaacatggagaatctcaaaaacataatgctgaaccaaagaagctagactcgaaaagatatgctctatgaatccattatatgaaattcaaaagccaggcaaaacccatgtggtatcaggagtcacaacagggttatgcttgaagaggtagtagttacgaggccatccccatatacaaaattcatcaagctgtacaatttagatttgagcattttactatatgtgagaaaaccttaataaaataaacattagaaaaacaaacaaaaccaagaaaaatgacaatatcatatcattagatagtgctcagccgaaaagccaagtcgacggccaggcgcagtggcttacacctgtaatcccagcactttgggaggctgaggccagcggatcacgaggtcaagggatcgagaccatcctggccaacatggtgaaaccccatctctactaaaaatacaagaaaattagcaattagctgggcgtggtggcacgcacctgtagtcccagctactaaggaggccgagacaggagaatcacttgaacccaggaggcggagcttgcagtgagccgagatcacaccactgcactccagcctggcaatagagcgagactccgtctcaaaaaaaaaaaaaaaaaaaaaaaagaaaggaagaaaagccaagtcgccaagtctaagaattttcttctcagagctcaagcttctaaatcaaccaagtggaattctgccactttcagtgctccccactatgtcccttgcctcaaaggtaaagtcagcccgtgatgtcatcactggaggcctgaagaatcctagaaaaagtcataggggtacatttctttatttaggtcagaagccctatgttgaaaacctcgtctccatactacactagctttctgatctctttctttatatcagccgtttgtttttcatctgatctctttctttgtgttaggcttctttttccaaaagatgcttgtctttcctttcttgtcacaggacaggccaggtgagaagtctgatggctgcgtgtccgccaagggcgaacttgtcatgcaggtacctcatgagctctaaatccgattgcaccttctaagttgttccagggctgtggcgggcaagacggggtttgggttctacagaaaagcatctcagcatttgccttctcatctgactaattataccacccaggagggcatttatttgtggcctctggtgttacctttgacagccacactgtcagcaagtggtgagaggaaaggttgactgatcccattgctggtcttattgggctttattactattttaggaaaaagttacataaaactttaatatgcagatgtcctaaataataacaaagatgtggcctaaaaatagacaatgggtttttcaagattgccaagctgtctccagaacatgatctgccaaaatgaagctaaccagatctaaaagttcttcttaatccttaaatgtatacttaagaactcattttttttacttgggttcagcaatgaacattttttgtgtcttccacagagttccaaggaatgcagggaaggcagcctggtgaggaacaaagagtactagaaaaggaaatagaaaaccggggcctcctgctctgcctctgagccttaagtttcctccgctcaaaggagacacagtaatccctgccctgcccacctcccagaggtgctgtaagattaaatgagaatatacagattcacgtgttgtgaaaagtaaaaggccgggcgcagtggctcacgcctgtcatcgcagcagtttgggatgctgaggcgggcaaatcgcctaaggtcagaagttcgagaccagactggccaacatggtgaaaccccatctctactaaaaatacaaaaattagccgggcgtggtgggaggtgcctgtaatcccagctactcgggaggctgaggcaggagaatcgcttgaacctgggaggtggaggttgcagtgagccgagattctgccactgcactccagcctgggcaacagagggagattatgtctcaaaagaaaaaaaagaaaaagaaaagtgaaacataaggccgaatgaggggagaatcttaatatgtgagaaagctctagacacctagaagggcagaaaggtgggaaacacacacaggcgcatgcatatccacacccgatacatgtatgccagttgtttagggcaggcagccatcgggttgtcttgcatctgttctgatggggcagagcccccactgtaggactggctgttaaatacgttgaatatcatctccagaggtgagggtttattcctcagcctccaagatgcttctgggcatcacatagtcaccctgggcaggtgagacaaattttttagatcatcggaaatgctactatccttttcaaacaacatggcactgtgtttgctggacttttagcttgagatctggaaaagcaggcattagatattgaatatggagcagagctgtgcgtccacattggtgtatccttccactgaacccacaagtatttgctgagcacccactcttgtgtctggtgctatagggtccttggtagtagggttacacacaccccactctgctcccaatgcattttaaatccagttgatgttttgagtcatttatctaagaaagtaaaaaaaaaaaaaaatacaaatgaacaacaaaagaaactccagaagatagtacatggtgcgtttgtttgcttgcttgcttgcttgcttgcttgcttgttttttgagatggggtttcgctcttgtctcccaggctggagtgcaatggtgcgatctcagctcactgcaacctttgcctcccgggttcaagcgattctcctgcctcagcctcccaagtagctgggattacaggcatgcgccactacacccggctaatttttgtatttttagtagagatggggtttcaccatattggccaggctggtctcgaactcctgacctcaggtgatccgcctgcctcagcctcccaaagtgctaggattacaggcatgagccaccatgcccagccaatagtacatgttttaagtgcaatcattttagttgcaatgatgaagggaaacttcatagagatgtctcttgaattgagccctgaggataagcaggtttttgttggtggtggtggtggtgttttttgtttgtttgtttgtttgtttgtttttcttttccgagacggagtcttgctctgtcgcccaggctggagtgcggtggcgagatctcagctcactgcaacctccacctcccaggttcaagcgattctcctgcctcagcctcccgagtagctgggattacaggcacctcccaccacgcccggctaatttttgtatttttagtagagacggggtttcatcatgttggccaggctggtctcgaacttctgaccttgtgatgctcctgccccggcctcccaaagtgttgggattataggcgtgagtgatcatgcccagccaaaaatttttttagtagtctgcaaagaaggaagtgggcatttcgggacatggaatgggagaagaaacaagcacgagcagacccatgggtgggaatgcaagagacacactctagacttactagaggagcaagagcaggacttggctgcacctgcagctgagggttagcaggaattaggagataacagtagaatagggctagactgaaaaggcctttgatgccaggttaggaaatttacattttatccacaaaatccaaatcctcctttaataatgagatgtctttacaagtttttgggcaagagtggtatggctgacctggtgtcctgggaaggaactgtgtggggatggtgtgcaggacttacctagggtgggaaaggcacaagcagcatggggctgtggcagctaccagaggtaaagggacatttcagggaaagacttggcaggacaagaccttccttggatggatggatgaataacagaaacagggaaccaagagaaaggccgagtttcatagggagagaagatgggtcatgtatgaggcatgttgagcttgtactgatggtgagacgtccagtcgacagtactacccactggccagtgagaaatgtgggaccagggttcaggaggaaactggggccggaaatgagcatttggaaggcgccagggtggaagcgggtggttcactccacgagtgctatttcacttacgcgtatgatcagacggccgtgctttctaagatcatattcagctgtgtctcccacaaaatttcatcttgtgctgtaggtacaagaccacgtcatcgttgaatgatttgaagctacagcatcattgtcccatcgctgatcctgacctcaaaccctcatttccgttaacactacttaaaggccattcaaactggagacacttagctacttagcccctccgaaaattcagccagtggaaaaacacctgactgcctgccctcctgcttctcatctgcctctccgaagctgtcttggcttcaactctcatctcacgccccctattggatgaagcagagctaatttctttttcttttacctttcaagtataagatcatccccaccccgggtacccaccccctgctggtcttggtgaaccccaagagtggagggagacaaggagaaaggtacgttctcttctgtttcaaagtggagcaactagggcgacacgactcaggcccttcctccccttggcaggaacacagcaggctgtggagacaggcagactcaaatcccagcactgccacctgccactttatgacctggcccaagtgacttaatgtccccgggcctcggtttctccctctgtaaaatggagataattatcattcctcctctcacaggtgagaacagacacggtgcttagcccacagcctgccacgtgagccattattaagaccactagagttagaccacgctctgagatgcctgtgcctttctagcctctcagatctcttgatttaagagatgatgggcagcccgttgattaggacctgctgggctaccgtcacccgtgagaagccagtgcatccacctcatcagtttgctgaaatgcccagttcagcggaggctagaaattgctgaacagcacaggtggacagggagaatggttaaagcagctctgcctcccaattccgggatcattaacagatggcaccgtgatctggaatccaggttaaaaaataataattagtagagttaaagcaagaactatgaggacccccacccctgtccaaggggcaggacacccctcctgaactgacctgacaattccaagctggagccaggaaagcaggcctgggtgcagtcacggcctctcagcgccctccctcccccacagcccaacaccacctcctgcgtttcctcctgatcccaggactgcagggggcctctccctggggaggagggggtcctgtgatgcttttgtacagtctgcagagggcagaatcacactgcctagaccatacagaacatttgggagaaggtctctgtggaggataaagctttagaatgaaagttctgttctctgggtttctctgccctgtcctctttgtaaggggcgatgcttctgggcttaggagctggagtctaggttggtagttcagccttgaaccgggagtgataacacgggtgatgccaggtggaacctggacgccagggtcagcaggcagtgccctcccctccggggtttaaatgaaccctcatccctgccaccagtgggctccagaggtgtttgccctaatgtgacttctcacgatgacatattccttctctgtctctctctctccctccttttctttttttttccatagaattcttcggaaattccactatctgctcaaccccaaacaagttttcaacctggacaatggggggcctactccagggtatggagatcacaatctttacctcttatttctccccctcccttttaaactccaatgaagatgcctcttttgtcaccttttttttctttcgtctctcaacttgttccttcctgccattttactccctttctctgctttttctcacgtctgactctgactcctggagatactcaggatgcccaggaaggctaactctgtttgagaagtggcctcctgtagcttgtcctagaaaaagttattttataagagggggaaaactgcacacacctttcatttgattgacaggaggaacaggctggtaaattattttaacttatttgcaaggctctgttagctggtgtcttcatactgaatcatcagagaagagaaagttttcttatcattgtcagtcagcagtttggaaatctagacagtgactcagagttctgccttggtgttccgttgtggggtcattttaggatcaagacaattacttgttcaatggaatcacttttgttttctaaatcattcgattttgaggttgttttgctcctcctgccacttactcattggctattctcttctcgttagcatggggttgtaaagaggcctggtgggaggcgtggtccctgtgtctgcggctaatggtgagctgcaggtctctgtgatgcggcccctacagcacctgggctagaaggccaggaaagcctgggcttcctcccagtccgggccggtgctcgagagccctctactggccggccccgggcccggggctgtctgcatactctgggctgggcttgcccagcacgcagccatttgcccaacctccaaaccaggatttctgctccgggttcagctagacccctcagagaggttggagtaaggactctgaaaagagaatttgaccctgtctttggttggctgacaccaaagctattgtttatggcagcggtagtacaaggcccagttaaaaagagaaagaaacataagtgcggattcagtacacctgccatgatttacctgtaaaagtaatttcagaacagagcccacctctgtacaccactgcagttgccatcacagtcaccgtgattgccatcactgctgaacagtacagccttgtgacggagcagccccccacagacacctttaccagcccactgtcaaaactggcagacagtcctccagcttcacctcgtgtattctaaattgttttcatctgagacgacgagccaggtggctacttcccgggctgatacgccctgagggtctctcatgcgcatgtcactctctaatcagacaagctgcctagctggagggagcgtctgttcagaattcacttcccgtcggagagtcccgtcggagagcagagttctgcaagagaaggaatgttaatttgcctacacatgcatcagtgattctgaaagctccagggctcttctcagaccaccaggctgggcagattggaaatattgaccttaggcttcccaagttccacccccaaggtgtccgcagggcacattcattctaaagcagaggttcttaacttttttgtgccaggaacccccttggcagtctggtgaagcatagaaaccccctcttggaatatttcttaatgcataaatttaataataaaaggtgaccagggaaaccatatcaaaaaacagttattaaaacagtaaaacaaattagtgatatgagaatatatgagcttcaccaatacgtcaaataggaagacccagaagtgggtctaataactaccgtaaattccaagcagtgatgagcatggcagtggtatgaggcatctgtcacaaccataatgaaacactaacatggctgtgattttgaccgctgacaaagtcatgggtatggttccaacctctgtggtctgttgcctacatgctgaattgaaggaaatactactaatttcagtttgagcttagggaaaataagaatgtattattttctcctccaagttaatggccctctgaatccaatccatagaacccttggaggttggtggaccccaggtataagcaccctgctctccagggttaaggctcctgagaagagaagggcatcactccactcactgtggcccacaggagagtgaagagaagatccagcaaattcggtgcatcttgcttaccagggcgggtgtcaggacagagcaggcaggagagcccgagaggagtgaaaacactgggggctatttgtattgacgccaaaactctggactcctctgcgtaactagtacagaatttctagaaaaccattttccatttgtgtcgaatgttgagtcagattatccttgcacaaggatggcccccttggccttggctccatattcaaggcactgcatagtaacttctggtttcagaacattgagtgaccctttcaaccacaaaaggaatcgaggtcttaacatactcctggggaacagggcagactctgactcaacatgtatcaatgtcagctgcaacctagtaacaagcccattttggcctttcttcttcttcccaggttgaactttttccgtgatactccagacttccgtgttttggcctgtggtggagatgggacagttggctggattttggattgcattggtaagcatgggctgagagggcgtttgctgcttatttatagtaagcgtatttacaatcagcagaaggcaataaaaaagaaagagacatggagccatgtctgttcatccttgtatcttcccctggaccaacacttgactaaatatttgctttgggtggaaaaaaaaaaaaaaaagaaataagacaatcgaatgattccctccaatacggaggtaacagtttagtttcaggcctttcctgtaaagcagatctgtcatggctggggtttgggcagtggcaggacaggccagatttggggggtgggaggacaggagtggaattctgggcagaccctttggggttggtaaaggccagagaactaagcatagatcatagcctgggacaaatcaccttgagatgaacacccggagcctgagtccagaaagtgcatctagaaagtacagatcagtgcaagcaaagaaggaccacactgagctgtgtccagtagagtacatctagataaaaaggcccaggccagaaggctggtagcctgagttctacccagctctacctggatctgtgggtcctcggacacatcagccccagtaagtgatggaaactgactgaaattctgggatggaagcagagtcaagatctaaccctacagaacccagacaaacactgcaaagtgtaatataaggacaagaaagcggccgggggagcactggggaggacagtcatcaaagtcagagactgggccctgagcgatgagccctgggctttccattcttcatcccaaaaatgctgcctgtgctccatgatgtgtcaagctctccccaaggcactggagatacagcagggaatgaacggacaaaaattccactttcatggagcacaccatgtagaggaaagagacaggcaatgaacaattaaataagtgagacatagtatgtcaggaagtgtttaaagtacagcagggaaggggcacagggagctcaaggctgcaatctaacacctgacagagaagacaacattggcatggagatctggaggaggggtgagtcaagtggatacctgaggaagggcagtccaggcagaaggaacagcaaagacgaaggccctgcagtgggagcaggccaggctgctggaggcaggccagcatggtcaaagcagagtggattcgagaaaagctacagcggatgaagcagaggtgacgaggggccaggtgactaggacatatagggcattctatggaatatggcttttatactgggagggtcccatgacattggatggttttgagcaaaggaggaacatgacagattaagagaagagggcagaagcggggagatcagttcggaggccactgcagcagtccaagtgagagatgtccagggcttggaccacaggagaaacagagtggtggtgagaagtggccagcttctggatatctttagaaggtgaaggcaatacgatttgctgacagactgtatgtgggagatgagaggacgagggaagtcaaggacaagccaggactagaccgtgaccagggcagagaaagccgtgcctccgggggctgtaagtagaccacctagctgggcgagaaggctgcaggaccgtacacctgccgcccgccactcccccgggcgctttggttgccatggacacagccctgccaagcagccacccacgctctcctgtcaccttgggctctggagttgtttgtgggaggagggaggagtcctccgggagccaaggaaggaaaagctgatctgcagagggtggatggctgcggtaccggactactcacacggctccctctccaccatgagggagaagtaggctttggcggagagctttatgcagttcatccgcagaggacacaggtgatagaagctgctcaaaacagaaagaaggaagatcacagaaggaggaagaaacattagtttttttcacaggttagtgacccaaagagaaaaaagcagaagcaaaagggataactgcgtaagatattcatccgttcactctcatttcagcacttgttcagtgctctgcagcgcccccccatggtcccctctctgatctgttctctccctacacccatagcgatctttcctgcatgtcactgggtgcatggtgtgcataaagcacaccagtggcttccattattcttgggataaagacaaaacccttgaagtaatctacagggccctgggtggtccagctgctgcgcacccttccagccttatttctacctccatccctctccatctggactcaggtcccggcccatctctcagacccctgggcgttccagtctcccttgcacctcagggccttcacacaagttggccaccctgtctgcagtgctgccccagccttcactcagtcagcttccactccagatctcagctgacatgtggcttactcaggggagcctcccctgacacacccaccagcctcagtcaccttcttatacgacagtgctcctctgtttgttttccaacgtgaatgtgaaatgatgcattatctccatggattcctcattattatctgtctgtcccactggacagtcggtaagcaccatgagaacccaagccacggcttttttgcccactctcagagccggagcacctaacactgcatctgcatatagcaggcttcagtcgatatgtatgaagatgctgtgagaatgagacccagtccccctcggggaggttacaatacattcagggaacaaacaaggagataattacaagagagtacaaagagatcatttctggtgctaaggaaatattctgacgaggcaccaggtccaggctggggcaactagggagggtctcccaaaggcagcttctgagctgagccacagagagctttgtgctttaaggaagtgaaaacacttgagaacggttgacatgttgcgtgggaggcaggatgtgcagaaggatgaggctagggagaaaggcagagcctgcttcctgggcctactgtggtaggctatggggccatgaggagccacacagccccatcccagaagtgaaagcagtgagccagtgcgagggactgtggttcatggacttcccttcttggtgaaagtgtgggtgacacactaggagggtggaactggaggcggagagagccgagaggaggctgttgcagcgataccagtgggaaggaatcatacctgcactcaggcatcaccatggggatagagagaagagattgcttggagatctagtaaggagacaacacatagaatgtgatatgtgaatggatgtgtgagggaaaaggaaaaacctagggcggcatacagctttctagcctaaacaccataacaacagttgacctgccgaggtggggacacagaagaaggggcagacacaggaaacaagagccttctaggcaaagggagcaggctgtgcaaaggcagggaggcagtgctctgaacacatgttctgaggacaacgagaggggccattgcattgttttgctctctatctcaagccttccagtggccatctcagtcctgggtcttgcctgcgctcagccatttctgatataggtcagacaacctggaggacctatgagctcccagtttgccaggacaaccctagcttgagccttccctgctgattcctgcatctctcctcacgccgcaatcacattgctcacatccaggggcaccatgcgtgctgaggtctcatggaaatacccacccacccccaagactgatggatgcctgtgccctcttcagctctcccagcctagacaatatgccacggtagatctgaggccagatgaaaacatgttctattgtgctttctctgatggttctgtctgatgtccttcacaactgtcagaagaggaataattaggaatctgtgtcattgcaattctgagaggtggtggaagtgacaaactggttgtgggggccaaataacacctggaggttttgttcatttagctaatgttagtttttaaacttttaaactcgagtggtgaacagttgaaggtgagcatcttcagcttgtccaatgtcccactattccctagtgtcctagccccacctgttttactaatctgtatacctgcctggcccctgaagagaggaggggaatggacttggagccatagagatctgggtttgaatcctggctctggaattactttccctgtctgccattcaagtattgaccaggcctagctgctgcagtcagatgagattgagcgtgttcagggtagaatggttgtagactactttccctctgtcaatctcagtttcttcagctacttgaaggaggataatcccttacaaagttaggctgaggaataaatggagtaagtgctgattatcattaaggattaaaaacatgcaacttaatgttttggggtgtatgctgccaccccaaaggacagatttaggatgaaatttgaataaacatatgcaagttgcagggatacagatttagctcaatataaaatacaaatggacagatttaactcaattagtggtggttaacacgctgcagatgggatagatggctttaggaagtagtgtgtttcccatcagggtggtattcaaacaaagaatgctatggaggggttcaagcatcagatcagggataaaaagacaactcaaacattctacagtcccatggcatatggttctctgttcctctgtgtgtcttgcagataaggccaactttgcaaagcatccaccagtggctgtcctgcctcttggaacaggaaatgaccttgcccgttgtctccgctggggaggaggtgagtttgcatgctaatggtggtaccctgggaacaggtgttcctgtttacagagatgctctacagagctaggctgaacttacccttttatggatcacattccgcagcataatactcaactctgcagtcatgtcaagtccatgaccctttctctgccctccatcccatgctgaatctagaatagaagcccctcttctgggctctgggagctttttctccctcagccccgagtttactatcatcctgaaaccatcaacttagagcctgctttccccagtagaaagcaatcaactgtagggtaaagacaaagtctcatatgtcccatccccagagtcccatccaagaaggtgctcacttagatgttttctgtgtgaaattccctctcccacaaatggctgatcttctgaattaggactaaaactgaggaccaaaatgctacatctccagttacttaccgtcactagaagcattcagatcatcctaagccccatagccatgggccctcattttgaaatttccctaagaggaaacacagagtggtaaccagtgtataagacaaggggcagagaactttgcaaactgcagtagcccccatggcgttggacatgcgccagaaaatggagaagttcagctcaacacatggagcagacagatcaggctgccggccagaaaaggggtggggactccagatggctgctaattcagagaatgagtcaagaccaggcagtgcaatggtcagtgttcaatgatcagctatgcttggtgggcagtgtcaaagcaagcaggacctaggcctagcggccatcttaaaattctgcctgccacactgtccatctcccacatgacacagcccagaaggatctgctgttctcccatgcagagactcccagccatccagcccaccgcttctccagggtttgcttcgcttcagctacacaggcctgtgacctttagctagcacccactccctcccctgcccccagcctctgattactttcagttatcctgcccttctctgtggctcggggaacgtaagtgtctctagcccacagacacagtggggagtcccatagtcacagatgccctgggcttacctgccctgacaactacctgtgcattagcaagaatacagcctttctgctgtggtggcaaatgcagtgctgtcctccacaggttatgaagggggcagcttgacaaaaatcctgaaagacattgagcagagccccttggtgatgctggaccgctggcatctggaagtcatccccagagaggaagtggaaaacggggaccaggtcccatacagcatcatgaacaactatttctccattggtgtggtgagttggtcaaagatcacctttctgtatggaagggaaacgcccaggaagggttccagccttctgttgtcccctctgggtccctagtgtctacctgtcttacctgcccccccagccctgagttgggtccaagcattctgaaacttggcctgagtgtggacaccctgattgcacccccgctttattccccatctcttgcttagggagtaaattctctcctctgtcattttaactaacacaggaaaagacagaaaaattttcaaaagacatattttctccttctgcaatttgtagcagtcgtagaaaagcaacaccaagaaataaccgggggacaaggttggtaggaaactctcacatgagcttcaggaactgggaattctgatcttcaaaggaagaccatgtggtcccaagttgccctggctggcttagccctcagatttccttctctcctattctctcttctctcaaccccattccactcactccatgggcatcataaacctctaggggagtctcctcccagctgaccccttaggctgaatgctgtgagcctccttgatgctcccacagcccttatgctcaccccattcatgcacactctgcattaggttgaaggaattggtttaatgtgcttatctggtgccccccactgccatgcacacacacacactccctcagtgcaaggacagcactctgttcctttttcacccactagccccagcacatctagtgtagctcagcttctggtccaaagaggattggagtgggcactgcttcccaggctgctgtgaacaggatcggaacaggaggggacagatcaatcatttctataaatgaagctgggggttgggagggggtgggagtgcaacaaagacactagtatttactttttttaagaatgacagaattggtcaggcacggtagctcacgcctgcaatcccagcactttgggaggctgaggcgggcagattgcctgaggccaggagttcgagaccagcctggccaacatggtgaaaccccatctctactaaaaatataaaaattagccgagcgtggtggtgggtgcctgtaatcccagctactcgggaggctgaggcaggagaattgcttgaacctgggaggaagaggttgcaatgagccgagatcacgccattgcactccaacctggacaacagagcgagactctgtctcaaaaaaaaaagaatgacagaattattgaactatttgttctttttttcaacaaatatttatcaaattttttccctaaacttttattttaagttcaggggtacatgtgcaggatgtgcaggtctgttatgtgggtaagtgtgtgccatggtgagttgctgcacacatcatcccttcacctaggtactaagcccggcatccattagctgtttcttcctgatgctctccctcccccaacatccccacaggccccagtgtgtgttggtttccccctcgtgtccatgtgttctcatcgttcagctcccacttgtaagtgagaacagccactagcatttattgagtacctgtgtgctctccacagtgctagactgtacatattccagccctcacagtagtcctgcaggtatcattatcctgctcatctcactctacagatgaggcttcgagacccttgactcgcatggtggtgccttgttctggagccaggttctctcctctctgttcccttgtctttggagttgtgctgcccagtttcacatgcatatgaaaccctccagacgaatcctctgccccagactctgtgatacctgcactcctcaaccatcctcagctgtgtttcttttgaaattttggtattttaattttttttaaaggaaagagaaggagaaatgataggtggcttgaggggatagcaagtttaagtaaagggtgttgttttgttttgttttgttttgtttttgagacgagtctcactctgtcacttaggctggagtgcaatggcattatctcagctcactgaaacctccgcttcccaggttcaagcgattctcctgcctcagaagttggggttacaagcgtgcaataccacatccagctaatttttgtatttttagtagagatggagtttcaccacattggccaggctggtctcaaactcctgacctcaaacgatccacctgcctcagcctcccaaagtgctgggattaccggcgtgagccaccatgcccagcctaggttttatttttttaataagaaggctaaatagagaaccatgggagaagaaaggactaaaaataataataccttatatttacagaaggatttaaaatttaccaaattcacagatatattctgaagggcattattatctctattttatgaataagaaaacagagactcagattaagggatttgcctttattctctgactcctaatccggtgctctttttctattactaaagcagaagagggaagcattgctgggcccatgatcgggttctgagagggtggaggtggtagactgggagcaagtttaggggttcctatgtcccaatctgattcatcccactggatccccggcctcagctgaggggaatgtttccctagacctcttccaggtgccccctccagtgacccacgcagatgccctccctcctcttcgtgctcaaaggcccctctcctttttggaccggctgttcaggctccgcttcccccagcaggaacatgtgcagccttcagctcctgcaaattagacatgactgacaggtccggggttctggagcgtgggcttcccatcattacagttaaaaaaaactcatatgtctttttcctatagtaaccagaacataacttgctaacatttattgagtacctactgcacaccagacatagtttccctgccagtggaggcaggcattatccatttgtgttttgtaagaaggaaccatagcttagagaggtacagaaacaagttcaggctggtgagtggcagagcttggaatcataatatttgaactctagagccaactgagctgtggaccactgagctttgtgcctccttgaagccccctccgtcttcatgttgccaaatgtaacatggtttgaaagaggggaatctcaaaatttagttgtggtggctcaccaccacctcttatcagaaatgtaaattccacccccacaacagatgctgattcatattccaactcagtaggtctgggtaaggtctgggaactggcatttttaacaagaccctgagatcattctgatgcagatggtcctgaccaagttctcagggagtgaagacaacctactagagcagagaagaatggtcaaaggaagtggctcttcgctggcatggaagccggaactgaaataaatggagagggaagcaaggaaggaggggagaactagccctctaagcaacgggctggaagccagagctgaggagcaagactggcagagctgcctgggaacttctagacagcaggttacagcgcagctgcctgcagaagcttcagccccacctcttccctttctaacacacccagctctggctgacaaaaacatggttccccacacctccctgtctcaacacagtgccctgtataagatggccctccttagtatctgctgaccaaatggatgaacacacaaagaggaatggacagccttccctcaactaaatagccaggccctaaacccaagagccaagactattcagtaatcatagttttaatttattctagcaaaaaaagtaggaaaaaaggaaggaagggagggaggaaggaaggaaggaagggaggaaggaaggaaagaaggaaggaaggaagtcctgctggctggctaattaattgtccccaaggaaacacatataaacagattctccatcactctcagtggtcaagataatttacctaccttgggctgacttataataatccaatctattcatctttccaattatgaacaacttcacaatatctttcttgtaatttttttcatacacctttagcttatccatgtttaatattatgttgcagaagaatgagaaaccagggctgttctcatctcattggtgtgcccttggctttctctcaataaaatgtttgcagggtttgtatgctcgctctttaaaagttgaaaagagaaattcttgagaaaacaagtaaccaacacgcaaccctaacagagtctggggctgacatttgcagaaggtcttgctccctatttgacttcccaaactttgtaagagaagtaggtatgtaaaccgaggaagttttacttccttatgatgatcaaatagaggcggactccactggcaaagagagccctgccaaggtctttgcctcttttgaaggacctagaatatcttatgatagcaaacatctgttgctttgtatttataaagatgatgacaatgacctctgagacagtgcccttgggtgctgtgggtagaattttctctgatgagtttactgagaccccttgatgccaacagaacccatttaatagctgagggaataaataaggcagggtctcctggcctctccagggagtgactgtgccctcattgctacgacagccccatccacacatcagtttctcaccagtgagaagctaagatcgttggccttatcagtccttctaactgataatatctactggcaggagattttaaacacagtcattcaggatgccacttcctctgacttctctggcctgctcctccctgttctttatttttagattagcagaaaatgtcaggatggccaggtatcagtgacaggaagtttgggactacaaaataattcccaaggtatgtgtaactctgaactcctcacaagctctgctttcatgagccttaacaggacgggtgaacagctaatcccttgattcagtgaaatctatttctgatgctaggggagcccaagggccaaggagaggccacagtggttgcactgacccacgcaccgttttccaccttgcagatcgttcctagctatcaccagacaagcttcccaccatgataagcgtcctacacatagggaatttctcaacaagacataatttttcctgcagattcttggattctgctggcaccaggttatttgtcacctgtgagagccatgaagatactaatacagtgggactccccagagggacgtggacaagggtctatacccttttccattccccaatctcccataattttcagaacaaccccaatttcaaataatctgtcttatggtctcctttccatctttttatctccgtaaattgccaaagtgacttagacctgtgttatccaatgtaatagccatcagccacatgtggtatgacatgcttgaaatggggcttgtcttaattaagatgttgagtgagctgtaagtataaaatatacaatacttttcaaaaatgtgatataaaaaattaatgtctcaataattattctattccatgtgatgataatattcaaggcttattgggttaatgaaaatatattattaaaattaatttcaggccaggcgtgggggctcacacctgtaatcccaacactttgggaggctgaggtgggtggatcacctgaggtcaggagtttgagaccagcctggccaatgtggtgaaaccccgtctctactaaaagtacaaaaattagccagacgtggtggcaggtgccagtaatcccagctacttgggaggctgaggcaggagaatcacttgaacccaggaggcagagcttgcagtgagctgagatcatggcactgcactccaggctgggcaacggagtgagactccatctcaaaaaaataaaaaaatttaaaaattgttttaaatattaacttcatctgtttttttttgttgttgttgtttttttgtttgtttgttttttgtttttacttttttatgtggctactagaaaatggtaagttacatttacatgtgtagcttactctgtatttctattggatagcactggcctagatactccaatatctcagagtccaaatgactgatgcatgtacttggaaggggcccaaatttctttgtccacccatgtgcttggagttgtagttcaggaaagaggctctatgtccataccttccaccatctcctcttcaccccacacctgaaagaaaagacctcagagagtaaggctgtgagaaatgctatcatcacttccatggatttgtaattcccatctcctgccttcagaacagaagtctcgctttgccttaattatcatcaagaaagggtttacgccttaataaccaagaaagggtttgaaccatcgtagccctggtttcccaaatttaaatgaagtcactactgattgtaaatatgctcaggtcattgcctgacatagaagctccagagagtgaaagtgaatctcgactctctttttaatccccagatagagaaacgtggtcagagtcttcaccctcattgcctttttaagacttagaaaaggagctgctctactctcccttgctactttgtgtatttgccaagggattacattgtcaaattagggaccacgtgcttcactaataatgttttaaaggctggtctttgtaaaaagcatctttgcaaaacctagttatggaaaaaccaaagacaatcagaactgcatggaaggagggggcctgtacacatatcccggagaataaaaaagctgggagtcaatcagcagtattgggggtaggggatagcgaagtacaaattgtgccaggcaacatgtgattgcttttttcttccccgcccccctccactttttttttcctgacagacgaaaattagtgcttcaaaggaatagaagtagatggaatattttctcgaattttagagaagcatttgacaaatgtcacatgaatcttattgagggtgttcactgaaatttgctcagagagtgggaggtgggtacagtctgggagcatgaagtgctgctgcccagggaagcggtgcaggctggataggcctcagggacagaggcctctctggggtccgcacatctcacccgtgcacccatgggggtgcctctccaagaccttaaactcttaatatatcttaagctaaaaaataaattggccaggcctggtggctcatgcctgtaatctcagcactttgggaggccaagttgggcagatcacctgaggccaggagttttgagaccagcctggccaacatggtgaaacactgtctctactaaaaatacaaaaaattagcccgacatggtggcggatgcctgtaatcccagctactcatgaggctgaagcggaagaatctctggaacctgggaggtgaaggttgcagtgagacaagattgtgccactgcactccagcttgggtgacagagtgagactctatctcaaaaaaaaaaaaaaacatcaatagctaaagtttaaattttaaactctcaaaacatcattttagcaaagaatgtttgccaatcacaaaataagcccatcttctcctcttgccctgccacctttcagatgtgggctgctggactcctatgccaggtgcacctcaccacacagagttcatgctcaaaaagcttcttcatagaactatacctcttgatgcttaaaaacacacacagaggccaggtgcagtggctcacatttacagtcccagtactttgggaggccgaggcgggcagatcacctgaggttcgagaccagcctggccaacatggcgaagacccgtctctactaaaaatacaaaaattagcccggtgtgatggtaggcacctgcaatcccagctactcaggaggctgagccagaagaattgcctgaacctgggaggcagaggttgcagtgagacgagatcatgccactgcactccagcctgggcgacaagagcaaaactccatctcaaaaaaaaaaaaaaaaaacacagaaattttcatataagaaatagaattaatatgcatttgatgaaaattcaaaattcactgcatggaatttcaagtgttttgtagccatgtattccagtaaatgggtttgtatatttttcattgcaaaacaaatctagtcaactccctggtttctgtgtcaccccccatctccggctcaattagcctgtttatttctgaagcccagcacctgcacccaaagtaccagtatggggcctgagcggtgaaggggcgttacacattcttctgctggaaaatgagaccattgtcgagggtggaagaccgagtttgaggaggaaagacaagttccgtttcaggtttgaggcttagggttggctctagagattgacactttggagctatcatcattcagatgctggtaacagccacgagaactcacgagatggccacggtgtggagtgggggccgcaggtagaacccagggttagggagttgtggtcagaggatggagagcccaggagcacagtgcatgacagccatcctaactgtgagtgctggagtgcagggggccgctagtgtggcaaagggatgtgctaataggagggcagtgtccacatgatgtaataatgactcttattggccttggagggagtccttcgagtgaagtgatcaagaagcagaagccagagtttaattttgttttattatctagtaagcatgttatccagtgccactaattatttctattggtgtggatggttaagacttaatatctaatagcatctaccaatgtcaggtttctggttttgacaatatcctatagttatataaaatgttatcattgggggaagctgagtgaacgggacctaggaactctatgctatttttgcaacttaattgtgagtcaaaatattccaaaataaaaactattttaaaaagaactagtatggaaagtcatttccagagactcatgctcagccccagacacaggctcctgatctctaactgctcacagactctcagtctccccagagggcaaaggctttccccttcactcacccctgaactatctatctgttctcagcgggtccgggctagagtgaaatagcaaggactccagagtcaactggcataggctgtaagagtattggtggtgctagctcatccccctggaggcagtgttgagcctctgttggctccgcggatgtgacctggagccccaccatgcgatagatagagtcccagggttggcatgactcagcgagtgcatgcgtgcgtcccttccctccgcactgcactgtcatgaccactcaccaaggatctgctttgtctctttcactttcaggacgcttccattgcacacagattccatgtgatgagagagaaacatcctgaaaaattcaacagcaggtaagctgcaggcccggctgcgctgccacccacccagtgtggccctggcggaacagaggcctttcacctgctctctggaaattttcccagccagggccgctggggacttggccttcctgccacttgccggaaggagggtttccatttccaagaaaaaaaaaagtgtcagaaacttggcgcaggctaactgcctgtcctctcccaaaggatctgtgcagagggcagggctggagggcaggaggtgggtatgaagggcctgcttttgcaggggaggaggtgggagggcgtctgcccttgtctaactggaacccccgtcctgagtctctgctgcttccaagtacagcgcctccaaccccagcccctcatgattcttttggggaagagcagggaggctggaagagaccctagcttctgtcggtctcaaatgggaggaggtggcagctccgggacttggaccaggaggaccagaagggtgtctcctttgcctcccccgacagcagagggcagcagcagagaggtacctgcaaaggctggagacccggaacccactaagtcccagcctcagcctgggcactctgtgaagtcaccaagttaggttcaaaaatgaaaggaaagaggaaaccagatcatttgcaagagaaagcaaacccttcttccttgtaggatgaaatttgccagaacttagttgtgactgacgtatagctacccctttctccctctttccttctttgtctgtatcttctcattagtcaattttcattctttctttctttttctttgttgtactatttcaagatgaccactatttcagacactgttcccaccccaaccctaggtaggttgggagaagaatggataatgatttggactttgtttttgagcctaaaggtgttgacttttatttagcccacagaattgtctttttatttatttatttatttatttatttttgagatggaatctcactctgtcacccaggccagagtgcagtggcgtgatcttgtctcactgcaacctcctcctcccaggttcaagcgattctcctgcctcagcctcctgagtagctgggactacaggcgtgcaccatcatgcctggctaacttttgtatttttagtagagatggggtttcactatgttcaccaggctggtctcaaactcctgacctcaagtgacccgtcctcctcggcctcccaaagtgctgggattacaagcaagaattgtccttaaaagagaggttagagtgttcattgaagacattcatttaaagcccaggacccatcattttcatcactggccattttcattcctactctttgtcctgaccccacagcctgagaagtcaaccaagaagaaggaggtctttttagaggtcagaaactgaacactatagcttcagaaagagcgatctgtgggatccgatagcagctgaacgaaccttttaggaagtgcatcctgccacagcatcttcttgctctcacacacacagactatacacactcactgcacactaggaacacgtgtacttccagcccctgatactatagtcacaaacttacagttcagatgatctcctctaacggtcttttgcactcccagatacacacaaaccacttttttaaaaagtactcctcttcaacccattcctcaggcttttaaggtcctcttttcacacaagtatcttttttttttttttttcatggagtttcgctctgttgctcagcctggagtgcagtggcgcgatcttggctcactgcaacttccacctcctgggttcaaacaattcttccgtctcagcctcccaagtagctgggattacaggcacccactaccacacccagctgatttttgtatttttagtagagacagtgtttcaccatgttggccaggctggtctcgaactcctgacctcaagtgagccacccacctcaggctcccaaagtgctgggattacagacttgagccactgcacccggcctcacacaagtatccttatacgtactcatgcacatgtgccatatgcttgtgaaagccacggggctctgttcattcattcatccattcattcagcagatcttttgaaaacgtaatgcacaccagacactgttctacaggcattttggacagacgcatgtaggggactcacagcctggtgctggaaacaggctggaaagcagatgtgcagaatggtttgtgttaagtgatgtaactggaggtgacctatgggagcaaaaaccaaggacacgaaacgtggcatggagggttttccaatgacagagacgcctgaaccaagacacggaaaaagaggagggcaacacagggagaaggaagcaaatgtacgaaaagatacgaaggagtgagagggtgcagtatacttgtggaagagcaagatgttcagtgtgatcagttgtatggtctcggcagaggaaagaaaccaaacatctgtaattcccagaaagcaaggaagcagagggagggagaaatttctccatatgccaaaaatcaataggcaggccaacatatgacataaatagagcaatcatccatcacccacatgattaagtacaattagaaagacacatccgtcagaaaaaaaaaaaaaaaaagattgtagcgtgcattttaatgcaaagtatgaacaaattcactgtgatctgtagaactgtttttccttctcccttccgagatcctataaacaatacttctctctgagggtaggttctcagctcactcttcacctgactgaggtcaaggtagcatggatgacatggtgacaggcccacggatttgcacgtaaacctgcgtgctcgcctaacaaacgaagacagaagggctgaggtagcacctatttcacaaggtcaccgaacgcttcctatgaagaactttgcatacatactgcttctaccctgcctattcgcccatgtctaaaatacccaggagtgcccaatttgtccactgagaggcaggcaagcagccattttcttcaggcttccttatttagcattggagatggttttaaataggcaggtggttgttgccatggttaccccattacaccagcggctaaacttaggaaaggccgcaaggcataggaagaaagcttgatacccaggatttggaaatgtaaacggcattatcaaacaaggcctattttactcagctgaactgaggttctccaaagagtagttactgcttggccggaagcctttaccattactgcccaggtttggactctcagggataatcttgaggttaaatcttgggagttgtcattgctgtgttttgttctgttttgttttgttttcagcaagggagagtgactagtcaggtccggaacacttaccaggaaaccggaatcattcacgttgctgattcccttttcttggctattctaacaagaattcttaacctgggatccaagggcttcaggggttttgagaacaccttgaaattgtactaaggtactgaatgtatttttctgcagagaatgtccataactatcagaagattcttaaaggaacctatactcccaaaatgtttaaaagtcacaggtctgaggcctctttgaatcctaagaggcatcaaattatgactcaaatgttggggtttcaggaaattcttcctccatggcctctctagatgggttgttgccagggaagatagtgggttccagaaaaccaagttatgttctctgatggaatagtttcattaatggagcaagaaccagaaccgaggaggcaggaatacgagccatgtatgatgggcaaaaaagaaaaggcctttaacggcagagatggggttatttttggccctgtctacctcctagttatcaataggctaatcattaattgctaattgaggaatgttagggagattatcgtctcactgttggcataaagaacaaaagagaaatttgattcaactgagattctaaagtgtttgaaagtgatctggaataaagggcacataagatgtggcccctgccttcaaggaaatcgtcgtctagcaaaagaaaaggaaaaatagtgctcaagtattctttacaaaattattttaacatacaaggtggttacatttcataggtgatatagtatacaggaagtcgtataatatgtaagaacttattaatggtcatatcccaaacatcatttgcaaatggattgttttctttttgggggatgtttttggtctttttttttttttttttttttttagaaagagtcattctgtcacctggcctggagtgcagtggtgtgatcttggctcactgcaacctttgcctctcaggttcaggtgattttcctacacagcctcctgagtaggtgggattaaaggcacacaccaccacgcctggctaacttttcttcctatttttagtagagatggggtttcaccatgtcagcaagcctggtcttgaactcctgacctcaagtgatttgcctgccatggcctccgaaagtgctgggattacaggtgtgagccaccactcctggccaaattggttgttttaggtgtagcaatagtgttaaaggggaacctgactaagaactgttttcatttttttagctcctcctagatgccaagtggtgaactagggtctttaaatacattaaattatttaaatcacaaaacaacctttcaagataaatattagcattcccatttacagataaaggaactgacactggaagaaaccaagtcaactaacaaaagtcatgtattttttaggcagtggggctaatttaatttctgacctagctcttcactccagagtccaagctctgtttgccgcaactgctgtctcacatagatttcattgagcaagcactgatgtataccagacactctgataagtactttatacatcatcccactcattgctcacaataacatgcaagggtaagtgctactgtccccattttagaaatgaaggaactgaggctaaggaggatggagctgtcattggcatcatctgcctttatggattgtctctgtgggaaaatgcctgctgagttccaaaggggaggagaacaggtacaccatccagtcataccttgtatggtgtgagcattctccctgtttccacgtccacagcaaggagcaggactggctgtatgatctgtgtgacccagtgcaaaattaaaaatgtgaggccccttcctcaaaaatgggacagcaaagcattaaactaagcactgagccctcttaagtgtggggccctggagtccacatctcacacctatgaggtggccctggcaaggacagaggaattaataaaaagaagacacttttgccagtagtcacagagtagggtgtttgcaataaagtcaaaagaatggaggaaagagggtttcaacttagggagaaggagagggactctcagtcccacaaacaggcagcaatcagtactagcagaggagccaagaatcccgtcaaagtcttccagatagccaaaaaccagcccaccatgaagtttccagattaagtctccatgaagggttttgcatatgaaatctatacataaaagccacctaattctaatgtcactgtcagtgagtgtctagaaagagaagtctaactgtggaatgttttcattgttggttagaaactcagagtacttgcggaatgtgttattctaaacctgttgagtgtatccacttgaccgcgtctctcagcagttgaggctgaagcaagttatttcctgttaggcccttcagagggaccgaagcagtgcttcattcctactagaagctgaccacctttctcaaaagcccttgactaattaacaggttctgaaatattagctttcttggagcaggtcccatggagtcactgatgaggggctccccagaagccctaatgtagcttgagtttttaagaggttggaaatataccttgtaaataactaagcacttagtaactatttatagaagaaggcagcagggtatagagtaagttggcatcaaaacttggctttgccgcttattagctatgtgaccttgggcaagttaatcttcttaatcctttgctgcctcttttgaaaatcttgcaatgttgctataagtatttagtgacataatacctaagttcatagtacacaggaggttcgcaataaacatttgttgttgaatatcattgaataacaagcattgccttaaattgacgataaagtattgacaataaaagggttgtttttaatggagtgacaaattggattcagttatcacagaatcaatgctccattgacatggcctttaacctgaaaagttggaggacaactaaaagttggaggagaccccagcagtgatgcattgaatctgcccaaatccttctcctgggggtgggaatatggcaccactttggttggtttggattctacaggacagaagctctagaggaaatccccttcactggctccatggaagtccaagaggcagaggttggggatctggacactagagattcgaagtccagtgccaaatccaggctagcaggatcaagggagggggtcatagaccccaggtgaaatggcctcaggaggaacagggcaggagtgagtaaaggagagtggcaggacagattccatgtgctccctgggtgcttctggcttactagcaggggtcatggactgcatggcaggtaggcaagtggccctgtggtcagatgctggggatgtgactaaccctccctcacggatacttctttcccctcacccaccacgtacctctccccaaccctgacctcagataaagacagagatgttctgtggggaacaaaatagaaaccgacaaagctcaagtcacacagttctgaaaatgaaaggaagggcttcctctcttgaatacctgcagtatgctctgccgtcacaagcataaaatatatcatgatttacataagattttcttcttatatctaaaaatgaaacccttctaagttattctttcctggcgccctgtgaggtagcccactattacaacccagatgtgtgactttctcaaggcataaaggttcaacagcagcaaatatagcaaagttaaaaatccttgccatcaaagtcttcattctgtgccctgaattaggctttgcctctcttcatctaatatttggcacctcaaaagagacctgctgtaggtagccagaggtccagactgtctgcacctgcttccctcaatatagcaaactatttttcttaaatatctgggattcagaaaagccccaaatgaaattaattgtgggattttctgtgttttttcttattcctgtaggtatttataaagaaatacaaaccttatgttttgtgctcaagaacctttgattttcaagtcaattctgacagagcaactgacttaattacttgaatgtttatatactaagccacaaaaatgttttgtcccccaccctccccacctctctttgggagagatgcagagagtaaaatgaatgaaatatgggttcatgtttttttcatcaggtgctcaacgttacacaaatgcagaagtccagggttttttgttgttgttgttggattgtttatagttaactcttgattattcgcagaaaaaagggagcaaccacgtggatcatctacagtggtggatgatcaaagattttgggagtctgttattaatatttgtatgcagttctccctgccctaacattcgtagtattttaaataatatgatgaaatcacactgactcttaacaatcctttcattttcctcctgggtccctagtccgcgtgggaacagacagcacaacctctcagactgttacacagcagcagcctgtggcgtctcaagcctccctacaaggttacccactggccagaaccgtttctttctgtagcttaatgggctttttcttgtagcccctgctaggctagaacaggaaaggtcttattcatgtcaacaaagagtagaatcggtttgtgatcatatcagaaggaacttgaaagcacgctatgttttcaagactataggccagataatcccaaagttatcagtatttactgactgattgatttctagaaatatttccatcaaagaactcaagatgtaatgtgtaatcagttcacaagagttgaggttagcacgataaccttatggaagaaaatcaaagcacacaaattcaaagtaaggtaggaactggctggatcctaacgtgagtgttgacagtctggatgctttccagaagggagaggttgagaaggtgctggaactttagatgtcttcgagcaaaaggctgaatctggaattgtttcacccaaagaagagaagccttagagagaagtgatcattggcctcaaatatttaaaaggcttttcgtataaagcaggaattgtgttattttgcacaattaatcaatgaaaaggtgactggaatgcaagactgggttaagccccaaataggacattaattctactggtcagagccatcctcaagtgcagtgagctattggagaaggtgatgagttttcctattttacgttcaagcccatgctggcaatgattttggaagcaagtgcccagtaggaaaggttccattatcatacaacctggattcaaatcctggagttctcattaaccactatgtgtgaccttgaccaagttactctccctgaacctcagtcggctcacctgtaaaactgaggtataatattatgtgagtttcctgttgttgctgtcatgaactgccacaaacttagtggcttaaaacaacactactggctgggcgtggtggctcacgcctgtaatcccagcactttgggaggccgaggcaggcggatcacgaggtcaggagatcgagactatcctggctgacacggtgaaaccccatctctactaaaaatacgaaaacaaaattagccaggcgtggtggtgggcgcctgtagtcccagctactcgggaggctgaggcaggagaatggcgtgaacccgggaggcggagcttgcagtgagccgagatcgcgccactgcagtccagcctgggcgacagagcgagactccgtctcaaaaaacaacaacaacaacgacaaaaacggcactgctgtgttacagttctggaggttggaagtctgaaataggtgtcaccgggctaaaatcaaggtgccatcagggctacattcctttctggagagtctgggggaaaagctgtttccttgccttttccaggtgtcaccactctttggctcctggccccctcccattgttgaagccagcagtggccagtcgagtccttctcatatggcgtccccctgacattctttctcctgcctccctcttccacttatgagaacgctgattgcactgaacccacccagaaaattcaggatcctctccccatctcaaggtcaattgactggcaacttaaactctatctgcaaccttaattcccccttcgcccctttgccacgtaacctaacatactcacaggctctggggatcagaacgtggacatcttcagggcattgttccacctactagcctcataggcttatttcgaggatctattggaacaatgcatttaaagtgtctattacagagtcgggcacatcagtggtagctattatgattgttattaatattcttattacaaagacagatcctacatcagataataaccatgttagatgattcagaagccattaagactctgaattttggtgattctctaatataggcagataaacatctatttaatattaaatagggtgtaagtcatcaatgtagaaatatatggaattatttttctcatcatttatcttgtttaaacgtttttcaataaaatatcaatacatttatcatgtaattaaataatacatcagacagtgttattatatagcacattgcaatatcattataaataatttggaaagttcagaaaagttaaagtaagagaaaaaaaaccaatcactcatattcccatcatggagaaacacaatattgccattttggtgcattacagcagttaacttgatagatataccttaaaatatttgtgataatgtgtttttataaagctatacatatcatttttaaactaatttttctttatataagtcattcaggctcattgtaaaaaaaatcatattttgcatcccctcctccaagaaataaacactcagcgctataacatattttctttcagcattttaattgcacaattttattgacttgagatcatgctctagacactagtttaaaacattaacatagtagcatttataggttatgaagggaaggtgatagaaaggagctgaatggagtgagttcatctgctgtaggagttttattggccttttccaattaaaaagtcccaacgcttttgttcagtcattgagtgttttaaagataccattacccaagtcccttcacaattgaaataactatttcagatgttatgcagctctactatcgtgcagggtaaatgaaaaatattttatcctttcaacacgattctgggtcctgtctatagttttgctgtatctcaaaagaaccagtttgtgttttatttgaccaccagagatagcaagagttgctgtctgaactatgcagtagtatagtttttgtttttatttttgtttttttgagacggagtctctctctctgtcacccaggctggagtcagtggctctatctcggctcactgacatggccgccttcagggttcaagcaattctcctgcctcagcctcctgattagctgggattacaggtgcgcgccaccatgcccagctaatttttttgtatttttagtagagagcgggtttcaccatgttggccaggctggtctcaaactcctgacctcagttgatccaaccacctaggcttcccaaagtgctgggattacaggcgtgagtgaccacacctggcctagtatagtttttaaagcatgaataaccatgagctcatttattaaagtgtttagaaaggtggttttcccaatgtaatcagtcctgctccaacccataccaacaatagtagccatcatttattgagagctttcaagaatctcatgtacattatttttaagtggcacaactcaccaagtgtaagtattattgatccatcttacagatgagaaaagtgaggctcatagagatgatgcaacttgctcaagaccacactagttactagagaagctacgattcacacctaggcctgtccactccacatctcctcttagcctgctacaattccctgcctctccatgtgcccagttttgtgccccatgaccaaagatgcacccaaaaaaagactagaaaagagccatagatatgattaaagggcccatgagaaaaccacaagttatccaaaatcacttttcctggagagaaacagagaacgtactgggaatgggcctcaagtgtgtgaaggattcacaacaggaaatagtgactgcacctccttactcttcatctcagttcaggaaagaatgagagagggaaaaaatgtgctctaaaagtaaagaattctcttttggatgggagcaggaatcttctggcctggagacatattaaagactgaaatgagttattgagagtagttttggaatctcttgcaaaggcttccaaaaacagagagttgcattcatccaggatgataaacacaccaccttctctgagcccagcagtgtactcattgcacccaccaggtccccacccagatgggagctttctgcctcccactccacaactgaccaagctgcacagtttaattgcacaattttatttacttgtgagaccgcttgcctcctgtgctcctcacttcccagttggtccccaagatgttccatcctcaggatttcctcagccaccctctggcccatctcgatgcccttcccattcaggcccaccctgcctggagctgcccattagtctccctgggacacgtttgtggtcctgttgctgctgcacaagcacctacttccaccacccccctcccacgttacatcccatgcttgcatttagcgccctttataacattctcctcctcaaacaccagcctcaccttcttgcttgcttgctctgttactctcaccttccccacacagctgctctcattccctcaatccctcaacctagatgacatctcctcttgtgacctagtcatcacttgtttcaaaatgcagcacagaatattctgaacgaacctacttaaccaacccatttggtactccactttctcttacactccatctccaatgttttgttgttgttgttgttttgtttgtttgtttgtttgtttgtttttgagacggagtctcgctctgttgcccaggctggagtgcagtggcgtgatctcggctcactgcagcctccacctcctgggttcaagcaatgctcctgcctcagcctcccaagtagctgggactacaggcgcccgccaccacacccggctaatttttttatttttagtagagacgggatttcaccatgttggccaggatggtcttgatctcctgacctcgtgatccgcccgcctcggcctcccaaagtgctgagattacaggcgtgagccaccgcgcccagcccatctccagtgtttttgacacattctgtcccactttgctgcaccctctttgtcttctataattcattgtttgggatgctaaactactgttatgtctccaacttgttcataagctttctcactcggagaggagtctgactctcttcaggatccactgaactaaatccagaagggtgatgctaagcatgtttcttcattcagccaaaatgagttgagcatctatttgtgttagcatcatgctaggtctgagaggaacgatggagcaccacagcccctgcttttcaggagttcgtgggtataactgggaagatgagcacatacagaagttaataccaactatatcagtgtcctgggctgccataacaaagcaccacagctgggtggtttagaacagcagaaatgtattcgctcgtagctctaaaagctgcatgtctggcctggcgcagtggctcatgcctgtaatcccagcactttgggaggcagaggcaggcggatcacttgaggtcaggtgttcaagaccagcctggccaacatggtgaaaccccgtctctactaaaaacacaaaaattagccgggcatggtggcgggtgggcacctgtaatcccagctacttgggaggctgaggcatgcgaatcacttgaacccgggaggcggaggttgcagtgagccgagatcatgccactgcactccagcctgggtgacagaatgagactccatctaaaaaaaaaaaaaagctacaagtctgaaggatgtcagcagggttgattccttccccaggctctgagagagaatgattttctgtgcctctctccttgcttctagaggttgccgccagtctgacatccttagcttgtagatgtatcagtcacgcaaatctttgcctccatcatcacacggccttctccctctgtatctgtgtctctgttcaaatctccttcttcttataaggacgtcagtcactggattggacccaccctaacccggtataacctcattttaacttgatgacatctgcgaagaccctatttccaaataaggtcacattcacaggtatagagagtgaggactttagcatatcatttttgggggggacacaattcagcccacagcatcagtcttcccccagaccttcacacaagaaggaaatacaatgtaatatggtagctttgttttcacgaagggacgtgaacaatgagggtgttgtgagagactaggatgaaacttcaggaggaaggtaacatttgcatgagcgctggagacagaaatggaaattcgccaaggagagaagcaaccggggaaatgctaggaggagggaagcagtatgggagaagggctgaagtgtgagaggacactggacatgagcggagaggccggaggttcccgggtggagtgaaaaggcggggggagcagttgcagcagatctcgctggtctgcaccagagtttgcatcttatcctaggagtgggtgagtggacagtgagggtatccatcagtaagtgctttttgaacagattaatgaaggaatggcttacctttcaaagtatttgtggagcaaaaatttcagggctcctagaaacactgggactttaaaatactgaaccttgctgaagtgttagaatagtacagacagagtgttagtcagaaagacccagaaaagaggcaatccccagggggagagagaaggaagaggggcatcaggagagaggagaaggagccaactctgctgccctggaggagtcagtacacatcagggctggaaaaactatggaaaccaacgacagagctttcttataaaccttgagctttaaagcatgctatttggttgtgaagtagaaatccatattgaaaaaaagaatccgcatgtcattctctcttcctcaccaccacaatttcagatgccttcagggagagggcaacttaggtggcttttaaagttagtttaacatgtctctttgtttgtttttagctccagaaaaaataatgtcagagtttgttggccttctattgtactttactaattaaaacttcagaaaattgttgcccttttgcataagagtatttttggaaaattattgcccttttgcataagggtattttggtgatacaacagagtctgtatctgtatttacggctgatgtgattagcatattcagtcgcccatattttctttaaacttttcataattgcatgcgttttattatgaagaaattgaaaaacaaggtgaaaaggtaatagatgttctcaaaaaagattcaagtgattaattttaactccccacttaaatcaacatttactaaaaaacgttgtaatgcacttattattgggccaaaggaaatttcaaaagcaagctttcactgtacttatcaggaaacgcagtaactctcttctgtgaaataatttacttatttcacagtaaattatttcacagaaaccctgaacaaatggctttacaactctgctatgccaggtcgtggtcaccctcatgtgaaatacagacacaaattcctgagtttcattgcattcagcatcaaaagaactgagtttcagcccttactctgcctcttacttactgtgtgccattgggaaagttactcacttctctgattcctaatgttctgatgtgtaaaatggaaattacaactgcctgacaaggtgcctgtgagaattagagtagataaatcaatggatttgaagtttatcaggtattggtatgatgctgtattgattactacagggatttgtaaggagaacatgcagcagtatatgagaatccattgtagaatctctaatttaaaggcatgctgtcatgattcctgtctgtaatagtaacttatagactcctagctttggatgggactttagatttcaacccccttctcagtgtaagcatcccctctataaacgctcctccaaagggggtcatcaaatctctactttgaagactgtagatctctattatgaagattgtaggagtgtttaaatttgaaggggttaggaggtgcttaccacttcatattttactaagaaggcattttcccaatcttctaatgctcttcaatgaaagaggggctcttctcacttcaagaatgtacttataccctcaaattactaacacagcagggaattacgtaattgctgaatattcatgtttattgaacctacacttagattgaaattcttcactctctagtaacaagatgttttctattctgttaaatggagtgtccctttaatcctgaaagtgggcctttttggagagcattccaaactgccaatcaagccaagtaccctaccttgcctttgaactcaataagctgaaagcgggtctgtaatctccagttttgggttaccacagagtaagagggagtgagaaagtcctgggtaaatgaaaactgcaaactgttgatctcagtgaaacttttattggagctctcaacagagtgttgtaattagtcaggttccccctttcctcttctgtaccaccttgcccctgaacttgggtggggagaggggaagcggctgctcataatcacggtttctgtatatgcagggttggggtggagataacaccacgggatgccctctgatttgagctgacgttctggttcatgccttgtacacatttccccctctggccccatctccacaactggtaaaaattgcactaaagaaaaatgaaatggttaacagctgatgggttagaaaagaagaaatttgaaggattggattatctacttactaaagaatttgtcccttaataatcaagccttggtggtataatcttaaaattcacaataatcatggtttgtacaaagtggtgagttcagggaaaaggtaaatgtgagcttaggctacttttctagtagttagagtcaagttcatttctcagtgttccatgattgtggaatagttgatctatctaccaggttgtgccctaacttccaaacacagagcaactgcaatattatttcccagaagaggtagatttggatgatattttatttctgtgcatgtgatctttgcaaatgccaatatgattcatctctcaccctgctgcagctggtcagcccttgaaatcagacatgtattaggactcataaccaaagacaccagcagctcagacaggaaggatctgaggaagaaagtagcggagacacttttgaagcatcgtccagggaaattcccaggggaaaactacagcggtctatatgaggggtcacaaatccaaacgcatgcagaggcaggcagttcatgtaaatgagagaagtgggtagatgtgaggctttagggagtggtgagaactctagcctgagtgctgtgtaaagggagcagccagttctcagtggccgtcgatcattgccaggttggaaagcaatccagtattaacagatctgatttctcaagagaagctgggcttcaggtgtgtatgtaaaattttccaattttaaacaccaccatgcaagccaaataaacacattgccaggccccataagagccttggccctccaacttgtcacgttgatgtccaggaaatataaccttagggttgtgatgggggccaattatttatttttcttgcttgaccttggtcacaaattattggtgctataaatgtgaactgatctcctgccaaaggagagaatgaatgggcttgaggagaattttaaagcattgacaaagggttcctagatgtcattaaaaaaaatgattcagggccaggcgcaatggctcatgcctgtaatccctacactttgcgaagctgagaggggagaattgtttcagcccaggattttggagctacagggaactattaatataatcgtaccacttgcactccagcctgggcaatggagtgagaccctgtctcaaaaaaaataagtaaataaaatacattaaaaaaaaaaagaaagaaatgattcagaaagaaaagggactcagggggacaaagagaacataaagagaagtcactctgattaataaatagatatggaaataaagaggaaattcccaattcctgtttggagaaaaaattaaaagtatagtctctgcacaaggagaataaatttggaccttctggagaagggagacacagcagctaacagacttaccatgaggttcaactcctcatgagcctgcagaggtagctacccagattgtcttcttccagcatgtattaaagtatgtagcattggttaaaatgccttccacaggatgttaaaaagaaattcacaagaagattggggggcgggggggtgtcaatcattgaatacacttggaaaattgagtcaaacataattcttttctgtttgatattgtagagcttttaatgtagattctaacctgctgagatcatgcaaaagcaagagaaagtatttcattcccaaatttacctgaccacagaatccccttaccccagagcctcttgagaccaatattttaccgaattcattggtgaaagcccctgcattcgagtgcacatactcatataacttacagactctttctcctgtctgcctgcgggcatggtggcaaatgacacatttggaggaatcctggttagtatctctagtgacctttgatgtcttgggtagcaagctaagggacatgggcaaaggcaatgctttagtctcttcctcagccgtgagtcataattttagaagaaacaggcacatatggggaacacagagctgctctgtagctgatctgagaacgactgttcttctggaccatggattttgatgctggaataagaggaccctggcaaggaattgggagcttatcacataaaccaagcggaatatttttggccagatacttgaggaccaaacagaagagctttaaaatgagatttaagtaggataaagtagagtgttcaaattaaactctaaaatcacagcccacagaagggcagcaggtgcaagctacaaataagaggcgtggctaaggtggtgccaagcagctctcccaaggaactggctgggaggaccactggggccacacctacagctgggacaagtttgccaaccacacagtgagaggggcaaactgaatgattcgtattccttaggggagaggagcacgaccttagagattgcagtcagagacatggtggggcaggacacacagctgcaccaccaggccaggtgaggatgacaagttcacataaattgcagtctctgaaatgggtggcagggatgtatacacaagaataagaagtcacaaacgtcagagtggaagcaaagtagagagcatatggatgagattttcaaaaggatgaaatagaaaggattttgctggcagggtctaccgcagtcttctcaggcagagcgaggctctggctcatgctttcctatttaagattttttaaactggcacaggaagaagatggaatagggaagagaaggggggtatttatccaggcatctgccctatcgagtgcatttttgacttgccttgctaacaatttcatgatgggaaaggtaagggaaacaaggagggagcgacttaccgtggacttaattctagacaagatgcctctaaccagccgatggtggggaaggcacaggaaacataggcagaaataaccagaccatcctagagttttaggattgcaaaaggaagacacaggatgcatacttcagtgtgtgctctctgctaccctttccacttctgctgcttctcactctccctctggcgtctccattcccctcctaagtagaactccagcccagacttcagggtcaccgccggggatgtagggtagaggagtctccaggtttctttcccaggaagttgaggaaagcaaagatccccaatcccaattcagcggaaaagatgtgctccctgtactttaagttggaactcagaatcatgaggccacgaagccagttttatatacaacaatggagttctactgtgcctttattggagtgtatatcatgagacatatatatatatatatatatatagtatacatacacgtgtgtgtattcttttgtttgtttgtttgtttgttttcctgagacagagtctcactctgtcgcccaggctggagtgcagtggccacctctgcctcccaggttcaagcaattctcctgcctcagcctcccaagcagctcagaatacatgcacccgccaccacgcctggctaatttttgtatttttagtagagatggggtgtcaccgtattggccaggctggtcttgaactcccagacctcatgatccgcccgcctcagcctcccaaattgctgggtttacaggcgtgacccactgcgcctggcctaatttttgtatttttagtagagacagggtgtcaccatgttggccaggctggtctcaaactcctgacctcaagtgatccgcccgcctcagtctcccaaagtgctgggattacaggcgtgagccaccgcacccgaccatgtgtgtgtattcttaattaatattgccagcaacccctgcaaggtaggtcatattgtgtcaattcaaaaatagagaaactaagagacagactaaatgatttgcccaaggtcacatggcaggtaagtgactgaactgtggcttgaacccaggcctttctgccttcccaccagaactccttcagctccagtaagctctctctaaaacgagacattgtagtttgggtacctaatgggttaattggctcttgtgggttagcctgggaacccaacctcaacatcacattgtttctatggggaaatgtgctcagagtgacaaacaactggcttaaccaaggaacttttgtaacccgacctatcataaagcaggcactgcctcgtgttcagaaagactggctggggagcgagaggggagaacaggatcagccagcctgcatcccctcagactctgtgatcccgttccagtctagctgtaggtttgccaaggaacaaccatctcacacgtctacaaatagccaccatagtacctaccgcagggggtagacgtgaggatcaaaagagcgcgacccttgggtgcataaagcagccagtgcaggtcagacccacggtcaacatttatgaagtgggaagtgagattcctctcaacagctgggggccggcagagctcagctggctccctcaggacccacccggcggtcacggtagtgtgagggtgtggacctgcttccagggtttgcctctgctcctccagacagttccaccttttagtcttggttgatcaggacccaggaagtcaccttccacagcgagaggctcagctccagcaggacagccaccttctctaagccttcaaggctcagtttctaacacgaggcctcacccacctgtatcttcactgtccccaccgccttcagataccagttcccagggctgatggatgtgtaaatgctggaaagcacagctaaggaatcactacagaacctcaggagtgagcattcctgtccgccttttccccgtccctccaggcagggatttctttttgtcccagtatttgactttgctctccgttaactgccaagagcaagcttattccatgccctccaccctccgccaaatcagcctgaaggggattttctttccacgaataactcttcaaagggagaaaggattgctaagaagcagccaaactgtgagggttttttctttctttcttttttctttttggatgagggaaaggagctattttctcttggcaaggacagatactaactggaaaaacaccctggagacccaggccatcaggaaaggaaaaccctgacaacatggtcctggccttgcctgcccctcagcattctcccctgagggccacccccaaagtggtgcctttcacagcacagtggccattctccagtcaggctgctgggcctttggagagactctctggcctcagaggggcagtgtctgcgagcacatttggtaacagtggatcatgagtctcagggaagccttcttgttgcggcctgtgtgtgtgcccgcacgtgcacacgtgtgtccttgtgtgctgcactgggaaaggatccgatttcagactttggcaatcttcgtgcttggagtcctgcccttaggaggagatactgtcaggtgccagacagaattcggagatcctatcaatggagaatgtgtccttggtccgcagaaacacactgtcttatatggaagagaagggtcactgttcagaggcagtagattcttaggggcccagaattacccttgaaggggtacagaggctgctctaaatatgaggcttatgggtttggccctttgttactctgggacaagagtggagactggagaccaatggggaggcccagatcatggactctgctaaagagtgtcagggtcccagccaacctcaagctgggatcctacagccataccggtggcgcatgtggtagatgtgagtaaacccagctcacaggcatgaatgagaatgactcacagctttgcagtcactagctctggtgacttcggttgacttttccatttctctcaggtgcctctggggcatagcaacaggagccagggagagtaaaccagtaaggagtatgggctggaagacggggtttgtattccagctccatacctcccagctgcatcaccaagaactgatctcggtttcctaagctgtaccgtgagaaggctgccatggcttagaagagaaccaccatggagccctggtatagagtagtaattttacatgtacccttttactatggaatagtgcactatttttattcattctcccactgcctcccaccatgggtgccatattgagtaagacttttttcagccataaagctcttctaagtaatcatttgtttccccattttgattattcaggattcaattgccattcaatccgtgtctctggttaccaagcagtaactgatataactgatttaattccattgcacatcaaaaaaattatagtttaacccactagttagcctatgctgtctttattatgattaaatgcacaaatactattttacattaagacatattgacagcagctcctggactccatttacactttggaagaactctttggaacctgtgatcccctggctataataagtccctgaaccctgaagacctcttagttgcaaacagtatgtcatctgtgattttacagttaatttctcacacatggaaatgactcaagaagtgtcttcagaggttattaagaggattccatagttatacaataaaatacatcctactcaagtttctccctccttcctcagcctttttttttctgagccccttcttgagatctcccctttcctgttctccatctttctgcccactcttcctggtctctggcctccagtcttcccatcattcaccaccctagatttttctgagtgccatgaacaccagtcttgtcccaagtatggaaacaagccagggaatacctcgcgccttgaagctgaaacacatcgagccaacacaaatctgttggcaggaacagcaggcacaagagtcacattcagagtacaaaaacagctatttataaagcctccttcctgatttttgggtgttcactttcccttgaaccaaaggggccactgccccctcttggaaaagatgattccatgcacagctcggtgcctgaggatcactgcgtgcctgttctgatgagcagtgagagctggggacagcatgcagcgtggattagatgtggtgacacactctctgatgggccaaggcagctgggtgtgcgggtgacacagatggcctctgcagcacctgtgaggtaacagtcaggggccccttataggacttgacatcctggcctcagagcagaccccacctgcctttgcttttcttttttttttttttttttttaactcttgatgtaaacttcggttaacataatcactaagcttccaaaggtatttgagattcaagtaatgtaaaatgttaacaggtaaagtactgtcaatattattactaatatttatcaattataattcaactcttgttgcatttggccgttctgcatttctgttatacctgatttgctaaattattatttaccttagtaatccaatgctagtctattatcttcagtagtggtagcaataacaccgctaataacccagcaaatcccaaatgggattgagatcatttgttttatattttaattgagatgaacctgatgaaaatttataattcatatacagaaatgtcctgttggctagctacagttttcccaaatgtgtagttttttggcttaggttcttaaaaacttgaattagttgccaattccaataatcaggagattttacatgaaaatatatttctggattctctttcaaaaatgtcagttctgacaatacttgggcccacactcctacacagcagcagttgtagaacacgtgagtcctcccatcctgttctgaattgtgtcatctcaagttgtctggggagcttggagaaaccttggaaagcagttggtccgagtctttcattttttttttttttttttttttttcagacggagtctcgctctgtcgccaggctggagtgcagtggcgcgatctcggctcattgcaacctccaactccctggttcaagagattctcctgcctcagcttcccgagtagctgggattacagtcatgcaccaccacgcccagctaattttttgtatttttagtagagacagggtttcaccatgttagccaggatggtctcgatctcctgacctcatgatccacccgcctcagcctcccaaagtgctgggattacaggtgtgagccactgtgcccggccccaagcccttcatttttaagatgaggaatctgaggcctggtgttgctgagtgactctcatgaagtcacatgctggtgtgtttgataatggggtctgggaggcagctctgcccgctggtgcagcacagtctccactaaatcattctgccctccccccatgccatacagaacaccatcttgtgggtagcatctgtttcaccaggcctcccaatctaatgctgacacccaaggcctaactaactatgtgagttatgagtcactcagagaacctgattatcaaagtccaaaccacaaagaggaataccttcacttcaagggcttctatttctagaaataactgtagtgttctctgtgtagacttctaagcccaaataaatgttttcatgttttgacaacttcaaaagcccaatgcccttaaaacttccttgattctcaggaaagggtccccagaagctcagggtggcataggaagctgagtgcgtagcctctgctggtaaagtgaatggccagcagctagctgggtttcactgtggacatccttgaaaacaggctattcatagctgtcaggatgatggatttcagccctaaattgctgacaaacataaaagaacatttttagttagtctcattttttctctcatctgtctaatgaaaagattcaactagctagtgtgcaattgatgttattttcttataagccagggggcaattaagaaaacccagaaatagagttgagccatggtgtcactgtttgtatttgccatttctccatgtggctgagagtcccttggagcacacaggaggatcttctgcctcaagaatgggttcatctggatagttcagagcctgacaatgaacctaggagtttcatggaactggaaatcagcctcagaacagctggttaaggattagtcatctccagctgaaaggtgattgtaagaggggaaaaaaaaatggtgggccaaagactactcaggaagagagatgcagaaaaagcattccagcagccatgaaaacatcgttagttttattttcttcaaaaaatatgggccacctacgatagactccccacagtagacccacccttacccctgcagcctgtggggaatgcgtcttcttccagtgattgtgtctcctagcaacaaggaagaacagctactgagcacttactatgcattaaacacctgcttggtactttgcatttgccacataagcctcacaactttgtgagtagaaaataatgttcccattttgtagaagaagtgaaggttcaaataatttaaataacttgcccagccagtgagtggcaaagccagtcatgaaccctagcctctcagctctcagatgccatattcttgtacaatagaagatgaaacagacaaaagctcagtgccacattctgcagcaacggtcctccaacaagggctaagagtaaagtaggaggggagatagcttcaaaagagaagaaggaacattgcactcaggctctctggtagtcagggagagtgggggctgcatctcccagctcaaattgtagggtaccacgtgcctataggcttttcctgaaggctttggaaatgggtggtggtggtggtgtgctggtgttgacaaaggaaaaggaagacgaggcagaggagaattcacttccatctgtgaatgtccttatttgtagcaataaggaaatcttagagtaacctacctgtaagcttcttctgagaactgaaggagatggtgtgtgtaaaatgtttagcagagtgcaaaaccaaagggccatgggaatagaatgcattcacttctagccaaaaagtgcctgagttaaaagaggagaaatagaagcatttccattttgaacatatctaaaagccacgtcccttgtgggtcagaggttcaatcttaggtcttggtgatgctattaaaagtgtataagctcggccgggtgcggtggcctgcaatcccaatactttgagaggccaaggtggatggattacataaggccaggagttcaagaccagcccggccaacatggtgaaaccccatctctactaaaaatacaaaatactagccgggagtggtggcgcatgcctgtaatcccagctactcaggaggctgaggcatgagaatcgcttgaaccggggaggcggaggttgcagtgagccaagattgtaccactgtactccagcctgggaggcagaatgagactctgccccaccccccaaataatgggggtttggggggtggggcaggggtcttgcttgtcttattcatcacttatctccaagccctacacagcacctggcccatagtaggggtccataaatgtttaatggatggatggatggatgaatgaaaagattaaccaaaaacaaaagtgctgtctttcagttacaaagacgactgccactgggaaatcaatatcctgtgcccctctctcaggaaatggcacctgtcatctatcacgctgtctaagacaaaaacttggctatcactgtgacccctcttttttgttccgtaagctaaaataactcctaaattttagcttgtgagtctcccccactcttctcttctaatgctattgtcatgacccttgtccaggcccttcccagttatctcctggatttctacaccacctccaatctattttccaaacttccagtctgtacctctctttccagtcccttctccacacatggaacagaatgatctttaaaaaacctaagtctgattaggtcactaccatcaccccatccccctccccagccacttgaggatggtccatgactccctatagaatttttttttttttttttttttggagatgggggtctcactctatcacccaggctggagtgcagtggtgcattctcagctcactgcatcctccgcctcccgggttcaagcaattctcccacctcagcttcccaagccgctgggattaccagtgcccgccaccatacctggctcatttttgcatttttagtagagatggggtttcaccatgttggccaggcgggtctcgaactcctgacctcaggtgatcctcctgcctctgcctcccaaagcgctgggatgacaggcgtgagccgtcgcgccccaccagattttaagataaagcacaaacccctgagtgtggcgtgcccacccttcacagtcttgctcctgtctgcctccagccttacctagccaagccctaccttgagttctgtgtcccctccagcaagactattctctctcttgcctgtcccatggcctagcttctttctttgcctgaaatgctctttctccaccttccctgtttgccttctacatccttctaagaattgggtgtccctccagctatgaactctggtgcctggttcttggccaaccacactgtggtctgcttcctgtctgtcttttccagatgtccaggaatgctattttgttctttgttgtaccaggcacaccttctctagtccctggcacaatgaatgtctgttgaattgatgaatactttgtctcacaccaaacatgcactttctccgaagtatattagcaattagcatcgctttggccaattgtgtgaccagtcaagataattaatcaaggattagggcatggtatgactctggaaaaatctattaaggacatatggggagcatatttttttcaccaaaaatcaagacacataatttaataaatatgatcacattttttcttgcccagaaaaatattaatatataatatctatagctacacatccttatctgtcatttttgcctcactatattatccaaatatgccagctcaagacactgaaataataatagctaataagtaagtagctggcattcttgatgagcctgctatacagcaatcctatgtgaagtgctttgctgttatctcatttaacttttcaactacctcttgaagcagatatttttcttatctctattttagagatgaggaaactgaggcttaaaaacattaaatcacttgtcaaaggttacacagccagcaatgaatgagtagtccgtttgatcttctcagttattctgcgatgctgacctaaccgtgacctcttaacctttattagctcatcagaagagctactactgggcaaaaatagctgtggcttccggaaacttttattgaaactctaaatctcctggcaataactttcaaaagtcatgattcaggccagcagtgatatttgaaaatggaatcacaagcaagtctcctggctacaaagatgctcttgctgccaaaaaggaatgctcagctttgacatttatgacaatctgtgtttttcctgttacttagtcttttgccatcattgactgtggaaaggcactgaccctcgttctgtcctccctggagaattctctccttcaggtttaactggttctgtccttttccatgttttcatttcactgggatctacagcaatgtcctgtccactgaccatctgcataatgatcacttggacacacataaaaatgcacaatcctgggccccgttccacaactctctcatagaatctctacagattggagccctggaagcagcactttaatcacattccccaggtaattcttataaataccaatgtttgagaaccacaggcatagtctccagatccacatgactcacagtatcccctggaccagcagcactgaagatgaggaatcttgggccctaaccctaaatcactgaatcagaatgtgcatcttcataaaatccccaagtgattagatatgcacatgactgtgcatgcagagaaccagtcatctagaacaatgtttcccccaattattttacatcatcatggcatgcatagaaaatgaaaatctatgtgtggcacactgggaatacaaatgagaatgtttgccatggcattggggctcagcctgtcccagatcccacctggctgctctgcaggctgaggagactgacatcccaggtacgcctgtgccacagcacatgggttgagaagcaccggtctgcttacagtacacccagctcttctaattttgttcatgaggcataattcccagagcttgcttactcttactttcttcatcatttattagttcttttcatgcatactaagagtcagagaagctatttcccaaccaactagatctcagaagtcttcatacaatggaagaacacagtttcatcttcaagttctaggtagactcttggggaaatctgcagaaaagagttgtgtctattattctggagagtcatctgctacaacctaaggaacatgaggaaaaaataagagccctcttccctctgaagactgctcctttccccttcatctgcaaacctgaggagagaggattagcgccatgcaaggtggcatcctctcttctgagtgccaagaagaatgtgattttgtttaatccttccttagcaaaatctgtcagctcgtaaactggacaggtgtcccttctcttagccaacccctgataatggggtgacagttggggtggaaggaatggaataccttcagaaacacttcccagtgagaccatctgatcaaaagcaccaagtgtcaggacacaccatctgactttgcaaagcccccagctacacgggaaccccattgattgattttttttttctctcaaggaaaatgctgaaaatttttaaagctcaaagtagtgaactcttactttgaagcaaatatgacaagtcttgcccttaactgaaggattgccatggcctaagcaaatacatttgaggaagaggggaggtgattattgctaccaatcaactcttctttttttccaacttgcctgcaagtctgtatctaattcttgccactctgcttcccccagtcagagcctgggcaatgcagcacacattttagctgggttagtgtggggctatccctcctctgtcctaagactgcacatccctcaagtcttagaaggatcttccctttacaccccaaacatacccaaaagagagttctgcctgagtaatggaaaggacagtggccagagcactgtattgatatttgccacctctggcttgacttctcgtagagctctttccttaatgcagctacagagaccttcttcctgttctgaccaggaaactcggggagcagttggtagttcacccagggttgccgtgatgtctaagaaataagtggattttctctaagttccgagcaagaacagttggtaaaaaatttctattccttgatcatctgattaacaagtgctgaaaatgtaagattggggaaattgctgaaggcttgggcctcccaatccaaagaacatagctattttacatgagcatttcaagtatggaatattgagacatctctctgctttgtggtccaggatgaagaacaagctgtggtactttgaatttggcacctcggagacttttgcagcgacctgcaagaaactccacgaccacattgagttggaggtaagttcccaagtggggagaaggcttcctggatcttggttctgctcctggactgtcacacatgcacaggatgtatcctcttgggaccttaagaggtgacccagagcgtagtctctgttgtttctccatcctgttccaaaacacctccatacgctcactcagaaggctccagtggcctgtctagagaatccctggggggctttgggactcagaggccccgagagcccagagccacacttcattccagccctcagccctccttccaccgtggccttgcgattccctcttttctgagagataaagtctccattgccgtcagcacagggagaggggctgctgttggagagacaatgtcccaagcctggtaaaagtctgggaactggtgttacagggcagcaggggtggggagtataggggctgcagccagacatcccccagctgacctgccttgattttcacatctgcttcagcgagctgactcacaggtacccagggtcagttttgtgggtgtgcaacctgtgtggtcacaaaatgtccttgtgcttagaagggcccttgatttcatcctatgctgtcactgtcttgaaatccttgataattttctaacaaagaagctggcattttcattttgaactaggccccgcaaattatgtagccaatcctgttggtgcacttgtgtttcactaactcttccggcacttgtaggggcctgcctcagacagtctgcctgctggctcccctcccctggttgataagctgcccacttcccaccctctcaccccacgttggctgggcttcgctccggaagccctctcattgattgccatgaggacagctccttggtgtctggccacctgaaagcccaaacttctatgcacacctgctccgtgggactttacgcccattggttctcttgcccagagttcttgctaccaggcctaccttcccgtgggatttaggcccgtagtcttcttttcacttgaggaaaataagtggaagaggcagccagagagttcagccagggtgggctcctcttggcccaccagcttggcctctaagcccgcactgcagtccagtggggcctgggcctccctggaggaggcacctgtggcctggagtggtgtaggaaagccctgcccctccctgccggaagggcccctgtgctcctcactcacagggagttttcacaaacaaaacacgaagccagaggttctgtgcggctgcatttgactcatctgcctgcctctcctcttcggttgctgggttaccaacgccagggtgggaggcgccgatctggctaatcccctgaacttttggccagcttggtaagagggcagagaggccaggcgccaggttgtgtgtccccaggtggcacacagggagtctgagaagccggtcctcctctcttgacgtgtgaacgcagtgctgggagctgaggaaggaggagaggccttggcaggggaaccgagtgtggctaacagggatatgtgtgcattttttccccttggcacagccgtctggtgaggtctctttaaatataccacaagtgagggacagccctggcctaaccacagccagctgcaggcgcacagcgactgcttgttctccctgcagctggccttgaaattgtgcccagaatacagcaactcagctcccctgcctctggcctgccctcccggctccaggccccacagtcccctctgggtttgagagacagaggctcttcctcaaccgcagagggggcctcgttgctaaagacactggtggcctctggagggggtggggttgttcactggtctggagggagggtgttgttgggagctttcagaagcacttcctgttttccttatctctccataatgagtctttttagtatttattcatgaggattagctgggggagtggggctgagcgtgtcatgtgatgggcagcttctgacagccctcaggattggggcaggcaccatttctgtatccagagaatagcggtgaatggtcctgtgccttgtgatctagagggggactaagagagacggacagggcgaggcatgggggtaacaggtgtaaggagaccgcagagccttgcagggagatgggagagtgtcaggggcctcaggaagagctggtaagagcagctatgctaagggaccttctaaacgtggttgctgcagacaacaggccaggcctttgagaaccagcacacgacccaccagccccaggccagcaaataaccccactgaggcattgctactacatttcgccatcttcagttccccaccatagcctttatttcaaagtcacacaaccaaccctgtgagctaagtagtccagagattattatccccattttatggggaagcaagctgaggcacagagatttagaagggtaaactaggccaggtgcagtggctcacacttgtaatcccagcactttgggaagccgaggcgggtggatcaccagcggtcaggagttcgagaccagcttggccaacatggtgaaacactgtttctactaaaagtacaaaaattagccaggtgtgggtggtgggcgcctgtagtcccagctactccggaggctgagacaggagaatcgcttgaacccaggaggcagaggctgcagtgagctgagatggtgccactgcactccagcctgcgcaagacagagaaagacgccgtcttaaaaaaaaaaaaaaaaaaaaaaagaagagtaaactgaagggagagaaaagtccagtgggacaggaaaaagtcacgtgctttgactgccgaccataacatgtcctaatatgctatgacaacgcagcaaggcaactattatcacattttaaaaatgaggcttaggtacattcagtgtctcaaccaaaacttcattgctgaaaactgataagagagaagattccaggtcttttagagtgaatttagcttggaacccaataaacagagatttacctaacaggtgctagaagcagtaaagtcttcagcaggaggcactgtttcttcttccttaatatgctgatttcctctcagctcatgcagctgggcaggtgtgctgagaaatgctttgcaaagaacagaagactcagtcctacttctcatttgaggaaggaatagattcaggctggatcataggagagagagtcagagaggaggaaaactgcgttaaagtttgcaaaaggtcttcccacacagcatctcatttattttgatgcacagaacaggcagggccaatattaatgtcctcactttacggttgagggaacttaggttgacaggttcagtgaccagaggaagggcacagctgtaaggaacttagggaaacagtgaagtctatttaggttcttccttttttttttcttcttttttttttttgccaatctggtaaaaagttggatggtgaaacttaaagctcaaatgagagactgcagggaaggtttccattaaaagccattcgcgtggcgaggcgcggtggctcacgcttgtaatcccagcacattgagaagccaaggtgggtggatcacctgaggtcaggagtttgagaccagcctggccaacatggtggaaccccgtctctactaaaaatacaaaaattagccgggtgtggtggtgcaggcctgtcataccagctacttgggaggctgaggcaggaggatggcttcagcctgggaggcagaggttgcagtgggccaagattgcaccactgcactccagcctggggaacagagcaagactctgtctcaaaaaaaagaaaaaaaagaaagaaagaaaaaaagccattcaggcgatatacaggcgatttctctgaggctagtggctgtttgagaaggaataggagacttggtctcatctctgaaacgaagcttgtggccaactgggccaactggacaaaagagaaactgaagggagtccacagaacacacaaaagctgttcaatatggcgcttgcttacctagcgctaaggaaactagatgcaaggagtcctgcagagccacgtgagtcaaatcactcctggccctgcctgtgactcaggcaggggagaaggtgactctaaatctcctgctcacctgtagacacatggccagggccctgacttggagtcacaaggcctggcagtgagccctggtctgtgcttaggttaagccacttattgaactgtatatctgagcctcagtattctcatctataaaatggggggcataggggttagtctacctcccaaggccattattaggattgaagttttcagggctttttgtttttgtttttttatgtaactggcagtggtgctaagtgcctcatggaatctgcaaagcagccctaagtggcaggtgtcataatcacctttccagagaagggggacacaggctgagagaaggtaagaagctcacctgaggtccataacctacaagtgatcagatcagccttcaaatccagatttgccagacacccgagagtttcggggcagtactggcacttgagaagctcagtctagagcagagactctcaaccaggtttgggcatatccaatgtccttattcccagtctttattttgacatttcagataacgtcaaaagcaggaaataattttttccatttgtcaaaatgggagcataaaaaaatattgcaaacgttcaccctagatgcttcttctatgagaccacaaaggaaggcctgtgaacgtgagtgctgtacctggaaactgggtgctccataaatcattgtgggccctaattaagaagccagcatgtcagctgggtgcggtggctcatgcctacaatcccagcactctgggaggctgaggtgagcagatcacctgaggtcaggagttcgagaccagcctggccaacatggtaaaacctcatctctactaaaaacacaaaattagctgggtgtggtggcacatgcctacaatcccagctactcggggggctgaggcaggagaatctcttgaactcatgaggcagaggttgcagtgagtggagaccaggccattgcattacagcctgggtgacaaaagcaaaactctctcaaaaaaaacaaaaaaacaaaaaagaagccagcatgtccccacacccccaccctcaccctcaccatccctggtctaaggcagtctctcagggtactcctctctgacatctcttcccttccagaggctcttaatattcattctaacctgatttcacctgattaagcaggtggggggtggggcgagggaggcacacagtgagtcacctcccccaccccaggcccagaataaccttgtagaggtttctggatgggatcataggtagagcaaaccagacaggcttcaactcaagcacttattttacattttgtagagatgtttcatttcactggctaaaaataagaacttacaaaattccttgtttttttgttttgttttgttttgtttttttgacagagtcttgctctgttgccaggctggagtgcagtagtgtgatcttggcttactgcaacctccgcctcccaggttcaagtgattctcctccctcagcctcccaagtacctgagactacaggcgtgcaccaccacgcccagctaatttttgcatttttagtagagacgggatttcaccacgtagggcaggatggtctcgaactcctgacctcatgatccacctgcctcggcgtcccaaagtgctgggattacaggcataagccactgtgcctggcccaattccttgatatttaatccaatctttaaaacatattcacaagggaaggtcagccagctccactaatatgaactaatataaactttgatggaggggaagtaagtccaaatctggaagctgctcaaaaaaaatatctggttatccagtatattttgggaatctctgcacatcaattactccttttaattgaggatttttttaattttttttttagtatttattgatcattcttgagtgtttgaggatttttttaatacagaaaagtcttgagaatagtatatcaaatactcccaactccccctcactcagaattgatattgtcattattttgtcttatttacttcaactatttttccattttttgttgttgtggttgttgttttggtttttttttgagatggagctcttgctgtcacccaggctggagtgcggtggtgcaatctcagcccactgaaaccccttcctcctgggttcaagtgatcctcctgcctcagcctcctgagtagctgggattataggtgcccgccaccacacctagttaatttttgtatttttagtagacacagggctttgccatgtttgccaggctggtattgaactcctaacctcaggtgacccacccaccttggcctcccaaagtgctgagattacaggcgtgagccaccgcgcctggcgccttcaactatttttcaacagaagaaataaaatattacagataaagctgaaggccccagcctctttatgctccaaacttaccttttcactcacctttatgttcttgagatcactccatgttagtgctgatagagcaggttggtcacttttttttttttttttttttttttgagaaggagttttgctcttgtcgcccaggctggagtgcaatggcacaatctcggctcactgcaacctctgccttccaggttcaagtgattctcccgcctcagtctcccaagtagctgcgattacaggcacccaccaccatgtccagttaatttttatatttttagtagagacggggtttcgccatgttggccaggctggtcttgaactcctgacctcaagtgatcagcccactttggcctcccaaagtgctgggattacatgcatgagccactgcacctggcctggttcgtcacttttaactgccctatggagttccatgaaaacccagccactatccgtgacgaggagcagaaatgggaactctcagacactgctggtgggaacatcagtggtaagccactttggagagcggttcagcaatacacgccaatccgaaaatgcatttatagcctatatgacccagcaagttcttctcaacatcgatctagagagtttctcgcacatgagcatagaggtgcaatgcaacatttttttattgcaacaaaatggaaccaacccaaatgactatgttattctaacactttaaaaagacagtgtgactaaatgccactgacactttaaaatggttaaattttaaaaaatttaatttaaaaaaaaggacgtgctgggtactatgctggtgatatttaatccatatcaccatatcaggatatgggtctcacctatgagaatccatattctaaaactaacatttagcacaaataatgagtcagattactgtcctttaagattgggcagatacctttagctattccaatctaaaccagcgccattattattattattattttgaagcagggcctcgctctgtcacccaggatggagtgcagtggcgcgatctcagcttactgcaacctctgcctcccaagttcaagtgactctcctacttcagcctcccaagtagctgggattacaggcacacaccacaatgcctggctaatgtttgtatttgtagagatggggtttcaccatgttggccaggctgatctcaaactcctgacctcaatagatctacctgccttggcctcccaaagtgctgggattacaggcatcagccaccacacctggccagtgctattatttttaaaaaagagacatcaaggacttcacaggttaagtaccttgactaacttcacccaaaccagtatgtgcagaagagaactcacggctcttaagctccagctgtgggcattctctactctgtcttagcatccacctgcagtgctgcacactcttaaactagagggaaagaggtcttcaagtcttggtctctcctgatatgatctgaaccttcttctcagctaccacaggtagagcctttccctggagtaaggaaagtaggaattggctgacgtacagcctgtccatgccgccacagtggaagaaatggaaacacgcatggggaagggaaagttgagaagagcattagaagggattttgagttcgtggaaaataagagggccaacctgattacatatcaaaccatggagtcaaaagtaaggctagaatggtcctgagagagctcctccttctagtttattccccttcctcaatccagtccagcagctccctcattccagcatcaccttcactgtgagaccatccaaggcagctcctgccacttctggttgcttcttcttgcccattcaccggttctcaccacttggtttctttctgcttcctcctaatcggtttctttccgctactcctaatatgtgggctaacctcttttcccgattacaaaggtaatccaaattcatggcagaacattttaaaatacagaggggcaaaaaagaaaataacccccaatcccaccaaccaggaatcagcactgctacaacattggcctcgtttcaatcttagggtaatgttagcccttgtttctttatcatcaggcctcctgaggacctctgtgattctttggcttattaaatctttattcatttttaaatgcagctccatcatccccatctctgtctctttcagtcgtgcactgactacgagtttccttcactaatgcttagaatcgttcagcttactaaagaaaaactgtttctgtcaactttcccttacaaaattccattgtttgcttgcagtttctggcacataaaactttttctttttcttaaatgaccctcttttttatttcttactaatgtgcaccctgtagttcacttcaagcctctattcattcatatgcttttattttccggttcttttccatttcttttgttctttgtgaattactttgattttcttttgtcttcagactcctggctctatctactttgtgtcttccgtggacttagaagtaacttttaaagattatgttttatgcctacattttcacaaagtagttgttgagggatatgcagcatgtttaatagatggggcccaagaaagtctcagaagaccaaagttgggggtcaagtgattcagcatgttgggtcagaatgctctcccacaatacatttctttctggaagatcctctcagccaacttctgtcccagccccaggaagcatatgtcttctaccaccaaggtcccttactaaaagaataactttccccaagcaatgtctaccaaacaaatgcatcttttaagtaataataaactgcgaggccccatcagtgggaaatgacctagactttttagaatattcagaggaattcatgatcttcatcaccacacatgggagatttgggaacctcagggaagagaaacattacaatccttttcttcctctacaatcacaggttattaaacagagaatattatatacaaatatgtcttgttggctatagtggatatgtctttgtttttctaacttatcctgtgaagtcataaacttactaatcttagtcttcactagaagaggaattaagaaggtagaagaactgaatctttaaagaaggtcatagaatctacaaggggttggataaataccactgtgcacacacacgtgttatatctcaagcccattaggctcaacaaatgaataacaatagcagcaacttactgagtacttaccacgtggcaagctctgtcttatttcatctttataacagctctgcatggttgtgtattattcccattatttacccaaggaaactgcatctcataaaacaagtaagtactcccaagatcagatgagtttcaagcctcaatctgtgatccccagcccatatgcccttcacaatgccacgggacctgcagtaggagatgacctctgcattaccttcctgcttttagaaaagtcatgtgtccatttagttgataaaggggctcccattcaggacttggcatatctatcaggcagtcagctttctgaagcaaggactttatcttattcattctatacccctggacttagcacaatgcctaaaatgaactaattcctcaatagttgtttgttgattataaaattgaaccaagtatagggaattccacaattggtgtgaacattagcaatgatcacttggccagcctcaagtcccgcctttttcttggaagctaccagaaaaaggggcccaccttgctgcatttgtaacacaaaggggaagatggctggcactcatgccttctcctaactgcgcagtgagtgagaaggcctcccacgcccatctctaggaagctattggtggtatctttgatagtagcagagggtccgggacaactgtgaaccaggacaggaaatgccaacattctcccacctctttcccacccaacagaattaagacagtgagtgggcagagctcatgtggcagtgagggtgccaggtggctgtagggtggaagtcaccctgcagggcagaaagggtctccattctgagccctctctcatggctcagaagcctacctgcccatgatccctgctggcccccaggccatcaggccctgctttgtctgcaggaaagtgtgatccctcaaaaagccccatccactccaggttggcctcagcttcccagacagacagcaaagcctattaatctgcatccagagcaagaatcccttaacacactagtttaaaaaaaaaaaaagaaagaaagagaaaaaaacacctggggagggtggagcagtggataggaaacagctttgccttctgtccaactctgaagcaacccatcactgtgaactctgagaaacagcagttttgttttggaaactggcacccagtgccggctcactcctggaaatgaatttgggcacccccacccccagctgcaatattctacttccagtctgcctgccaacacccccttccagctgcccctctcaaaggcaccattgtgcccgcctggcacagcaacagaggagggctaaagaggaagaaaacattttctgcccatgggatgttcttaagcaggttgtgtgtacatggcttcaatgccgcattccttgagcccacacaaacccgccagaactccatcatccctgtcacagatgcagccactttccagtctaactggcccacctcagctcactgtcagagaactcggagcacacaccagggcggacaaggctaggtggaagtggggggtcaggatggcactctttcagcacagcgcacactagcctgccaaaacaaagctgaatgtagatgtggaattttggaactggaaggggatttagttccacttaccactccacaaaagactcatcctagcacattctgataagtgggcacccagcctcctcctgaatactccaaagataggaagctcactacttttcaagaagcctgctgcgttactggacagctctgatcttcagaaagttcttcctgatgttgaacaaggattgtgtgtcccattccttgtcatcttcttccctagacagcacttagaacaatacttggaacaaaatcagtgcacaataagtgtttacggggtgcatgactgaagtcttcatccactgggcccattttcaccctctaggggcacacagagcatcctccacactcctccacatggctgcctttcatagggctggagatgtatcttcatggtgtctccttttcatcttcactgagctaaacagcctcagttccttagaggacttgatttatagacccacaaatatcctggaccactcttctcttgatacactccatttttttcatggtccgccttaaaatgaaaaatcaaattcctgttctataatactctaaatgcgatctcataggtaacaaagcacaagagtaagaggcatcgggagcatgcactctgtaagttgggctgacttcttgatctcgtcacttgcatctcatgcatgaaacccgcaggttcatgaggactatcatgaaccttgacaaatttggaaagacattccttccttagtgtcaccgagtcaatgtttcctcatctgtaaaaatggaaatacaaggccgggcgcagtggctcacaccctgtaattccagcactgtgggaggctgaggcaggccgattgtctgaggtcaggtgttcaagaccagcctggccaaaatggtgaaaccccatccctactaagaatacaaaaattagccggatgtggtggtgtgcacctgtaatcacagctactcaggaggctgaggcgggagaatctcttgaacccaggaggcggaggttgcagtgaggcgagatcatgccactgcactccagcctgggctacagagcaagactctgtctcaaaaaaataaatgggaatacaaatactgacattgtagggttgtgaagattagacataaaatatataaagtgctggttcacaatagttactcaataaatgatatatattaataatatataacatacgtgtggattaatatcattatctaactgcccacaatagacatcagctcctaaaatgatataaaccagcacctctgaatgcaggagaagccactgttctgtaagagttgctacaggccaggccagtttgtgtatgtggataatactggactgtcctgaaagccaggcgtggtggctcatgcctgtaatcccagcactttgggaggctgaggtgggcagatcacgaggtcaagagatccagataatcctggccaacatggtgaaaccctgtctctactaaaaaaaatacataaattagctgggcttggtggcatgcgcctgtagtcccagctactcgggaggctgaggcaggagaatcccttgaacccaggaggcagaggttgtagtgagccaagatcgcaccattgcactccagcctgggtaacaagagcaaaactccgtcttaaaaaaaaaaatactggactgtctttccaataatgttgtcgccactcaatacatcaccttttcttcctttctgagccacatcaggttattgacactagaaacattctctctagtttttctctgcggaaaacagatattgttgtttgccctgtttttctttgactcccagtactttctctattatggccataggccctgcagacatgcaggtaactacttccttttcttccccgttgcctccagccagcagtgtgctagagcaagcttgcttgctggtgtatctcttcccaacttgccttttggtgatgtcatcatggtcacttgaaattggccatagtaggaatattgacaccaccatggaacacaataacaaaggctttttttcctccaagggagtctgctgttaagcactgacagcacaccactgcctctagtattgacccactggaagtaccttgaggacagggactgtgtcccatttctgctccatccctagagtctagcacagaataagtaggttctcatcattcttgatagatcagtgagtactcctgtcttctgcctcttaatgtctctctcatataaaacatgccccatgtgccctactcttgttacctattcaggtgttcaggtatggatttccttcagctgtgatcagaggaccacttgatggagacttggattaaccttccatgtctctccctatcctggaaatttggtccactttatttgttcactatattcatccagagaggttgggggaactcatacggaagcaaagaaaccttatcacgtttcttcaaagaacacctgggtttccattttaggatttttgcacacattatttctttcaactcacaaatagttatattggacacctgatatgggtaagacatgccaggaactgtgaagaacacagagctgtcagatatggtccccgccttctatgagtttaaagtctcctaggggacagacaactatgcaaaatgcatggcagaatatacattccctttaagaggagaaaacaaggcagtgaaaattcagagaaggggaagattcatttctagcaagagcattgaggaaagcctcatagaggagaaagcttttgagctggaagggtatgttaacgggcataaaagagttgatgggcagtttaggcagcgtgtacagcagaaaacaatgtaagtagtccgcaactctgtggcctctatgcagaattcaggctactataactgacatttactaaggctcagctaaccctctccctcagctactctcctatgtccaaaccaaatgagaccctacggcatccagccttcaccgtagtctgacttacattccaacctgccaagctaattcacagagagaggctgctccccgcccacggtatcagaaatgctctcgctgtaaatgagcaccactgcctcgttcttacctaagtcccacaggccccgggggctgcacagggtggcttattggtgctttctctttccctatttcctgccagtgtcctgttccctcaaaaaagaggcagtgtgcggggtggtgggggatttcactcaggtctaggtcagccacccctctgccttttagggtctatctgcggctctgatctggagcccaggcatcaaaggaggccaccgtcatctcctgcccatgcccctctcagcccatcagaacccctattcaagtgtgtcaggatattgtccgcctcttcctcagccctctctcttccttctcactgtaactgaagtgctattttccccagacatggcccagcatttactacttccatcttcaaaagagctaccccccggccaactctctcactcgctgagaaaggaaggaccctggtatcgtccccagatcaatgtcccagcactctgttcagcatcttctctttccctctatctacttcccatcctaggcatcccaacttcctcttctcatccattcatccaacaagatgtattgagtatcttctctgcctcaaacatccacaaaaaaaccttttcctcaatcacattatccttttagatcccatcttccctctccagcctgtgtgccaccaaaccacacggtgactctgactctgttccctcactaccaccacccgactcaccccagagtccctggttaagccctatctctcccaggagagagctgtgtcatctaggaaggtcaacttaccaactttagacctcactgttctcattttggtaattaggaatgatctctaatgtcccatgttgctttcccattctaagattctgtgcttcagcccttatccaatagccaaaattcctctttataaagttactcatggcttcttggttgtcggtccaaacaatcacaggtctaattctggatcagctcactctaattagctaagtaacattgggccattcccttaacatctttagcctcagttttctcttctataaaatgagatatttggactggttcacctttcaagcccttcaggtctttgattccatgagattacagatgcagagaagagaaaaaggctgggcgcagtggctcatgcctgtaatcccagaactttgggaggccaaggcaggtggaacacctgcagtcaggagttcgagaccagcctgaccaacatggtgaaaccctgtctgtactaaaaatacaaaaaattagctgggcgtggtggtgggcacctgtagtcccagctacttgggaggctgaggcaggagaatcacttgaacctgggaggtggaggttgcagtgagccaagatcacgccactgcactctagcctgggcaacagagtgagactcagtcttaaaaaaaaaaaaaaaaaagaaagaaaaagagagagagatccttttaagagactatacgagaaataatttatggagaaaatagcatctgtagagatttagaagaaaggtacagggaaggtgctagggtatcctaccattaggggactatattaatgggtcaagacaagaactgtataatagaaggtataggctgataacacctgaatccactgatcagtctaaaaatcacaaaaaagagacaaccaaattatgtgcttcctaatgagatgcaataggaaatatacagccccactaataaagtaatcttgccaaaaagccaaccctaaatctagtcaagcctgtagatctaaaaataccaatttagtgaaaatacaagggatagactatgtttaaaagacaccccagagatgcagttggcaaaatccagaatctgcgcaacactacagccttactactcaaagtgtggtccacggacctgcaacatcagcatcaccaagaagggggtcagaaatgcagtctcgggccgcacccagacctcttgaatcagaatctgcattttaataagaccctggagtgatctgcatgcacattcaagtttgagaagcactgctctaaggacaaatgacccatttcttcaataaataaaagacaaggagaaaaaagaacaggagtctatagatcaaaagagacctaacagatatatatcaacaaatgcaatgtaaagacttttcaggcaagctaacaatttaaaaaaatgatactatcaaggaaatttgaacaactactggatacttattaaagaattttttaaagagtaacaatagtattaaggtaattcttttttttgtttgtttttttgttttgtttttttttgttttgctataaactagttcagtctggtggtgataaagtgaactggggtagagttaaaacaagattagctgcctgttgctagaggtgctaattacccagactgggttttggggtacacgggggtttattatactctctgctttccctatatgtttgaaaatacccataattttttttttatacagagtctcgctctatcgcccaggctggagtccagtggcgcgatctcagctcactgcaacctccgcctcccgggttcaagcgattctcctgcctcagcctccagagtagctgagattacaggcgtcccccaccacgcccggctaattttttgtatttttagtagagacagggtttcgccatgttggccaggctggtttcgaactcctgacctcaggtaatccaactgcctcggcctcccaaaatgctgcgattacaggcatgagccaccttgcccggctttttttttttttttttttaaagaaagaccaagaaagagtcgtggaagatgggagggacaataactcagtgacagggtacccaagaaagagaaaattcccagcagaaaggggacacatgcctcccggagctaccgagtcctggcttccacctccgatctggcctggtggaggtcattcctgagagcagacaaagccgagtggcaggcctataaacagaaccgtctgcgtccaaaccaaatctgtggcacggtgaatcgaggttagaagaagggggaatttcctagttgctaaaaactgaaacaggtcatcaaataaattgtggaatctccttccctaaggcccttcagaaataggatcgacagggctggagtggaggggcccccgcccgccgcccttttgaggtcacggcgcaggagagaaggagggcgcggaaacgccggcaccggctgggaagcttcggtgctccgggtccctcttggcgagggcggagaagtcggcggcctctgcctagaattctgtgattgtagggatcgagacatcaagggcgggggtgcagaggattacaagttccctagcgcgtctcatttgcacataaatgtgctttgcctcctaaccttgtctctgttacctgtgcacctgccttccaccaaaccaaccaaccacccgtggctcaggaagaaaccagaactggggggattgtcttcccaagggggacacagttgaacgtggccggcagcctctggcctcccgggcctgggttcagacggactccggcgctgcttccaagaccgacatcgggcacctggccgccggcgcacccaggagcacgatttcatgcgtgtgcacgctctctgctcgggccaggagctctgtttcagccccactccgggctataaatccctggttccgcccagcgcagcctcggctcggagggcagcctgctagccaggtcctgggttagggatggcccacggtgcgcgcggggaccgccacactccttagcgccacgctggggccgcgcgggccggagcagggggagggggcccgatgacgtcatggaacagttggaggatttagctcgggaacccgccggggagcgggccccggggccggcgttccatttaggccgacagcgtcccgggctcggctccactttcccagacggcacggctgccttccacgtccagagcgggcctggggttctgaaggaaatcagtgcacgatcgcgaggccaggaactctggagaatgggcacgcaggcgtgcgcttgccaaggctcttaccagcctgggtcgggccaagaggccgttaagatgcctccagcaaagcctcaggtagggggagtgaattcaggaagataaatgcctcatggcacagaggttggggaacctgtgatgataacgcagacagttacacagtgctactgcattccagacacccatcaacccaccccttaaggcagatgttattcccctatcctccattttacagatgacaaattaaacctcagaggggtaaggaaacaacctggaatcacaccgctggcaagtgacagagccaagatttaaacccatgtctctctgccttcaagcccaggcaggcacgttctttccaagacactacattggctctcactttccaagtaggtgcattccaagagggagggaggacatcagcgtccagcagaccccaggcttctcccatctcctctacttgccctatctacatgggacccactgcggtaataggggaaggggacaacctagaaagcagagtgaggattgcctgctcttccaggaagaggtaaacgtttaccaagttaatagcaaacacacttagctggctatggatagagatggaggggacagggtacagttaaaactgtagtacggaagaaaggtgactttgtggaatactatttgtcaaggactgtgctggtgatgtacttttttaaaaaacaaacctggtgcggaggcaagatataataatattaatatccaacattgatgtgccaggcattgctctaagcactctataagatagagcagtagtgggagatctcaattattcaaacagctggaagtttaattttgctataagcctagcatcagcaaaaatcccgatttgcctcactgactcatctccagcgtaggatctggcatctgccttcctaggtttgcatcctggctctgccatcttgtagagtaggaagctgtggagccttgagcaagcatcttaacccctaagaggccctgtcagttgggggtagcaatgctgcctccctcatcatgttcatgtgaagatcgcaagagatactatgggtgaatcccagcacagtgccctagaaagctctcaccaagcatgagttgctaatattattcttattactgctcagaagggaaagggatgttttgaccaacagtgaataaattgagatgatgtagaagcaactacagccaagatggggaagtggctgcttcatctagagggtgataaggataaaagaaaatgtgggccaggcccggtggctcacccctgtgatcccagcacttccggaggtcaaggcaggtggatcacctgaggtcagttcaagacccggctggccaacatggtaaaaccccatctcaactaaaaatagaaaaaaaattagctgggcgtggtgacaggcacctgtaatcccagctacttcaggagtccaaggcaggagaatgacttgaacccgggaggcagaggttgcagtgagccaagatcacactaccgcactccagcctgggcgacaagagcgaaactctgtctcaaaaaataaataaaggaagaaaaaagaaagtgtgatccaatgggactctagcctaaatctctaattaggaatatgtgtatgaaggataggagggtagaagacattccaaaataagtttctaagaagtcatgaatcacactgaaaagaaaagaaaaaggagtcagtttttgtttttcaatcaatgtgacagcaacagagagtgttggttgagcctatgctttcaggaaactgtacacatacacgcaaaggcagagcctgggcatgcaaccaggtaggaatacacaaaagcaattcagacctgtgagcctggcttcaggctaactgaaggcccagctgaatgctagacaacgtttgaagtgaaaaagaacatagaaagcatagctcaacaggactgtgccattctggaagagttttcatcttttccaaagagagtggccttaaactaaaaatggaagaaaagatgccaaaggtggatactagaacccaaggtaaatcaatggagaactaactggctttgaaacacacacacacatttgaatccaagttgctggacaagcctgtaggtgtcattcaggggccactttgacaaatccagaaaacagagtaggttctagccaataagaggcagacaaatatggctccagtgttcaaaaaataagaatagggtacattttggaaaccacagactgatacactttattctgatccctggcaagattctagaatagattattaacaaagtatttaggctttgcacacagatattggtgacttagttgagttatcttattgcttttctaatagaggttgtagggtggtcacttaggaaatgctgtttgatctcggcacaatgttttatgttttcatggaaagaacgcaggattgaggtctggagacctggatacatatctagctccaccactaataagtcagatgaccacagagaagtttcttaacctcactggggctcatttatgaaagatgaggcatgaaagatgagaggcatcttcccttatgtgcctctcatctctaaattccatcatctgtctaataacaaaaagtaggctgggtgacagtccagtccagaagatgcagctccgatagagcagccataccccaaaggatgttaacgcataatgtttggtgttaaactgaccaaggagagtgctcggtcactgttttttccttttatgcgcacatattaatgacttaatccccaaatgatgggaacgcgatgacaaaaggtcacagaatgaagattggaagtaagctgggtagactagaggaaacacgggctgagagccagatgaaattaattaacataaatgtaaagttttatgtctatgttattttttaaaatctacacaggttcagaatggcgaagaactggatgaaaaatagatcatgagatgatctgggcaatgaagatgaccacccatttaagctgaagtgatgttgtcatctagccactaacaaaatggccagtgcaatctttatcaattggataataaggataaggataatgataatggataacgtgctgaactcttacatgagctttgcacgtcatctcatttctggggcatgatagtatcataaaatttcagccacaagaagtactggtgtggtagccacctgcccccattagatcccgtcgttgatgtagttttcaatgttgggggtcttgccaaatagcagggtaacaaactagagtgtgtgcaaaacagggaagccgggatgggaaaagatctgaaaaccaagtctcatgggagaagatgaagagagttgacagtccagaggtggcacaacctggtagtagtgtgagagggaggagaaataaaaaacttgggctctgactacctgcccttaaatctgtgtacttccacttgtaagttgtgaactttgggcaagttacttaacctcctctgtgcctcagtttccccagtgtaaaaagaggatagtcatagtaactaacttataggattattaggaagataataaatgagatgtgtataaaattgtgtgtggtagatggcagtgctgaatacatgtgcacaatggtgatcttcatcatcatcatcatctatctagggggtggcctatggaggaggaaggagggtcattctgtatgggttcagaagggagaacaggaccaactggtggaaacaagagtgagagagaatccagatcaacataaagagacctctcaaattatcagaacttcccagtgaaaaaatgagttcgcagttaccagagttgctcactgtatgccatcttgtagttggggaaacaagataacataatgtaagaactgcaaagaaatcaggaggtgagtcactatgaatggcaacaagtcttctagtcctgctctgttgataagtctctggaagtttgggtttgtacgtaacctcagagatagtgggtttttattgtatgcctttgattttttctttctcccaataaacaacataaagaccatgtactttgtactcaaatcccccaactttgaatccctgctctgttatttattagctgtgcaagcttggataacttagctcaagtctctgggtccagtgtttgcttctgtaagtgaaataaactacctactatcctgaggaacaaggatcagagctgatatttcttgctgtgttggtaagcacgatgccaaagtgggctgactttatagacatgtgagatgaaaattcaagccttctggctttttgtacctggtggggactgcaagttgtggagattggataaagaaactctgctccttcagcaaacacatatgccaaaattgcatttatgatacagatacaggagacaggcagattctgaaagccttccaaagcttaaagtcttgtgcttctcacagagagataaaataggagggggcaaaatgaaaattttctggccaggcgtggtggctcactcctgtaatcccagcactttgggaggctgaggcgggcggatcaacaggtcaggagatcgagaccatcctggccaacgtagtgaaaccccgtctctactaaaaatacaaaaactagccaggcatggtggcaggtgcctgtaatcccagctactcgggaggctgaggcaggagaatcgcttgaaaccggaaagtggaggttgcagtgagccgagattgtgccactgcactccagcctgggtgacagagcaagactccatctcaaaaaaatatatatatatatgaaaattttctgtcatttgttatgttctgaattttctgtcatttgttaggttctgaattcagttccactaaatcttctaatggttaggaaggggcaagattgatgataatgagattagactggagaacagtttgacaattgacttaagaaccagccctaaagcacttctagacctaaagatgaccctggagcctgtactgtattccccggagctgaccaggactggatctgtcatctcaccacagcagtcaaagcattaagtctgagcgactttgcccatgatttctcttctgacagtggcagggtggtggctgaggacctgtcacatcctttaagagagtacacacacacacacgcacgcacacacacagagcaccttgggttgtgacacactgaggacactaacagatggccttttctctccgtcctccagtgtgatggggttggggtggacctgagcaacatcttcctggaaggcattgccattctcaacattcccagcatgtacggaggcaccaatctctggggagaaaacaagaagaaccgggctgtgatccgggaaagcaggaagggtgtcactgaccccaaagaactgaaattctgcgttcaaggtaagccaggaatgaggataattgttttaggtcaatgcccagtagtaggtgccctcaggtggatgtcagcaggcctcgtaaggccccacagcccagcaaggactccatgctctgcggatatgctgactcgtcatccgatgttgcaaagtttacaacttaatccagaagacaaaaattcacaataagggtgtcctcaatgacagtcagttgtcaagctgtggggctccatgaggttcagagtcaaatgctgccaatgtcaaggttaccagggttctccaatagctaaatccaatagtcagttcctaaccctcatcttgccacagctgtcagtggcatgtgacccagctgatcactccctcttcctggaaacgcttggtccacttggcttctaggacttgatttgctcatggttttcctccccgctcacttgtcactccttctcggtctcatttctctctgacctcttgatgctggaggatccccaggcagggtccttgaccctcttctcttcactgtctgtacttaagcccttgatcaccccatccagtcataagactttatttaaataccatgtgcttactcatgatgcctccagcctgtctccagctttccctgagctccaggctcctatgtccagcagcctgtgtcatacttcccttatgtgtttagcagacacctcaaacttggtatgtccaatgcagagctctgctgtccctcccccaaaccttctccactcacagccttatttctctccattggtaactccagccttcccatcacaagagccaaaacgcttggcatcatccttgactcccctttttatctcacggctcacagccagtccatcagaaaatctgttagctacttttaaaaaacatccaggattcaaccacgtctcaccacctgcattcctgccatcttgatctgagccaccatcctctgtcccctggattactgcaaagcttcctcactgggttccttgcttctatctcactgccctaggtagcctgttctcaccaccacatcagagcagtcaggttatgacactcctcttctcaaaatcctgcagtggcttggagaaaaagccaaagatcacgtggcctagagggccccgtatgttttggcctctcattacctcccagacctcctcttctgccactctctccatcgctcactctgcctcctccactctggttcctccaacacagcaggctgctcccatgaaccaactattctttctgtctggaacaactgggtagtatgctttagaggccaccagctgggccttccacttttaactcaccagaatacaaacacagctttctgagaatgtccttaaaaccacctctaccccagccccaaaagtagccattttccaccagtgatccaaatggagagattcaatcaaagctcctggcagctgattcccctgtgggctcacgggtcctcacaggtcctcaatggacaggtgagctggaggagaaagccaggtgtaaaagcgctggcagaaacaccataccagcaggcaggagacaaaattctagtccaagacctgctactaacctatttttggcaccccagttttctttactgtaaaaacaatatcttgtatcaaagttttgataggtggatggatggggttgaaccagaaccttggttcttaaaccagctgcttgttgaaaatgaagatttgtggaccccagcctagatctacctaatcaatctctgtgctggttcctgggaatctcaattttaatgagctccccagatgactctgatgggctgccaggtttgaacaccattgctacaggcaaatgccctcagtctctcccatgcctggcattccatggctctgcgtctgtgtgctttgatgttccaggctgttagtgctaaggtgggatgtgatcccaccactagaagaaaacaaaactccgctgacatcaaggcgggggttggggaagttattctcttgtttcacacccgtctatttgacaatcagattgttatattccaggccaggtcatcaggaaacatcatctccacacctctgtcctttaagagaggattcaggaattgttgacctctttttttttttttttttttttgaggcagagtctcactctgtcacccaggctagagtgcagtggcacatgttggctcactgcaacctcctcctcccaggttcaagtgattctcatgcctcagcctcccgagtagctgggattacaggcgtgcaccatcacgcccggctacttttttctatttttaatagagatggggtttctccatgttgaccaggctggtctcaaactcctgccctcaggtgatccacccgcctcagcctcccaaagtgctgggattacaggtgtgaagaaccatgcccggcctctgttgaccccttaagtcccctttatttcacacagtaaacttttcagtgtataaagctgaataatgtgttcctccttcctcccttggcaggggaagttgtgggtgctaacagagggtaggggaagcattgaaggttgtatcaagttcctgcaaattttcctaccctggtgctcctatctcaacccccgctctggtatctagctccctcagagcagagaagggaatgagcagagctgaatccccaccaccaccctccctgctccccacttcgactctccaccaccctagggctgggggaagctcttgatgagatcatgtgctgatcaaggacaaccttcatcttcctcttacatgtctgaccttacatcttccccttcttcaagcaagaccaaagtgtctgctgattgcttttgactatcatgtacaggaactctcttccccaaatccccctttctcacccctacaatgtgctttcagagctagaagtgaaaccacttcctgttctttagatgaggacatcagctgatcagagtggggcactgacttctgggctttgcagagatgccagcactgagctttcttcttgaaagggctatgatctcatgtaagttgagttgttaatgggaaaagctaaagaggcaacgtattttagtgaaaaagcattcgcctgggagtcagaagactggagttccagtccagactctgcctgtcgctagtgtgtgacttgaggcaagtcctttccccttcttgggtctcagttttctgtatctgtaaaataagcaagtctgacaattatattttaagattccttacagttccgcaaaattaaggcatagtcagattttggtctatgtggactctttcttggacagaattatattcaaatttctaccttctctcagtgtattttgtcccgggatttataggctactggctgaggaggcagagagctctctctgcagcctcttcatgtgttgcgattcttaactccttggcagtttcattggagttggaggagagggagaaatcaggacacagtaggagggaatgagcttatcataggaaatggaagaggaaatgatgatgggaggggttgctctcaaatctctcatcaggccgggcgcagtggctcacacctgtaatcccagcactttgggaggccgaggcaggcgaatcacttgaggtcaggagtttgagaccagcctggccaaaatgatgaaaccccatctctactaaaaatacaaaaattagccaggcatggtagcacatgcctgtaatcccagctacaagggaggctgaggcaggagaattgcttgaacccaaggggcggaggttgcagtgagctgagatcacaccactgcactccatcaaagattagtctttctcctgggaaaaacaatccgagtaagaaggtcattcaagattagcatggaatgggttctatagaaacattggctgataagaaagcaataaggggtattgggaaaagccccatgcttacagttagataatctgggtttaaattttgcctttatgcttctagttttatagatcttgggaaattacccaaccaccctaagtctcagcttcctcatctgtaaaactggcataataatacatggcttattaggaagatgatggatgtgaaagtgcctggaacatagtataataagctcaaacctaaaaaaaaaaaaagtccctacgcctataattctattttgtgttggagaatgccagttgattcacatttgaagttcttgtcctaagcattactatccacctgcactaccactaagaaagagcagagctcagccgggcatggtggctcacgcctgtaatcccagcactttgggaagccgaggcaggtggatcacctgaagttgggagttcgagaccagcctgaccaacatggagaaaccccatctctactaaaaatacaaaattagccgggtgtggtggcgcatgccagtaatcccagctactcaggaggctgaggcaggacaatcgcttgaacctggaaggcggaggttgcagtgagctgagattgcaccactgcactccagcctgggcaacaagagcgaaacttcatctcaagaaaaaaaaaaagaaagaaagaaagaaaaaaaaagaaagactagagctcctgccaaactctagcccagcctttgtcgtagcacattaaacttatattaccaattgtacctactatctcctttcctagacctttcagattccaaggatggaggctggttgttattaatctttgtatccccagtgcctggcctcaagtagttaccccgcccccccccaagaaaggttcttagctacatgagaagcatatggaatttgctattttttagtttttgtaacaacaataagaatagtgagaaacagtctcttgtatttctatttcattttggcttgcaaataattttgcatgtattaacttagtgtaatcctaacccgaaacccatgagcaaggttatacccagcctcctccatatccctatttcatagttgaggaaaatcaaggcccagagaaagggtaggatttatataatttacgtccagtggtggcatcagaaccaagattcaagcccatgactcctagcctagcccaagtggctagtgtttagaaaatgcgttagggagtctactgtgtgtcttgcatcagccacgcactcaggaaataggaagtatttagacccagtccgaggaaaggctccacaactccttgttgaaattctgctccctctgcaaggcctacctaatggctgctggaagcgagcccagcctgtgaattccctgagcacttaattttgccttctatctcatcagtacactgatcagaagtctgcctgtgtcacgggcatgtgtgttctcatcatatgttttccctgccattacctggaaaatgaggatcacatgttctttatctttgtgtccccttcaaagcctcccaccctgcctggctcacatgtgttctacagaaacgtttgttggaagaggggagagaggggaaagaatcttgcctccagtttgccagtgggcagtagattctggagtaggacaggaacaggtacttagtgaaaaatctttagaaaaaaaaaaatcttagagttacatgtgagtatttgtgaggctgagaatttaatttcatggagctattataaactcatttgataagtaagatgtgctggccattttcaaataggtaattcaaatatagcttagaggacttgcaattgagagagggtagagtagggactcaccattgaactagaattcagaagacccagagcttctcagcaccagtcatggattagatgagtccctggacatctccagcctccatttcaacacttacaagatggaaacaagtatggtctccctccctcagccttgttttgagggttaaatgagatcatccatgtagggactgagcagagtgcctggaacctggtgagcccttggtcagcagtaatcagaattattgttaggtgtgggggaaggtatttataatataagaaaggggccaaatttagaatttcactctcttgactacggcttcaggatttcatctattatctttaaattgcctgtggctctaacaacctgtaattctagggttatgtattggctctgtgcctacacatgtttggctattgctgcccatgtggagttccacctgagctggctgtccagtgaagcaaggggagggggagggtgcccagtcttggatcctgaggaagcaccaagggcatggcacaaggctgggtcggtccccctggggttgaggagcaaagtcctggggagctatgccattgtttctctctggccccagcctaaaatataaatgcagaggcttcctgcatatttcctcagactcttcactgatcctcatgcctgctcctatccagccttcagtctcaagccagcagtggtctcgagcctgtgttatccacacctggcccctctggctgtctgatattaaagcaactttcctctcagtgatttcttggtcaatcctatttgaactgcaaatggtgtgtcctagaaaatgttttattttatttttttgagatgtagtttctctctttttgcccaggctggagtgcaatggtgcagtctcggctcactgcaacctctgcctccaaggttcaagtgattctcctgcctcagcctccgaggtagctgggattacaggtgcctgccactgtgcctggctaatttttgtatttttagtaaagactaggtttcgccatgctggccagactagcttcgaactcctgacctcaggtgattcgcccacctcggcctccaaaagtgctgggattacaggtgtgagccaccacacccagccactagagaaggttataaatgggtagcacaaaatctccccaggatctcactagataatactttttgcaattcttggtaaacaaagacagggagacagataccctcggtagtgttcactctgagtcattttcccagcagtggggacaggcttcctgtcagtttatttaacacatacttacaaagcccccaccacgtgccaggcaccatggtacaacggtgaacaaaaccaaaaacaaacatagtctttatagccactgggtgtgggggagccaggcctcaataaaataaccccacagacaggcatataattaggaactatgctaagtactaagaattgcttagctacccagagcccaggcaaggccagcaagccagtgtgtagctcataggcatgcccgtggcctcactagcctagcactcaaaccaactgagcagagcaggcacaagcactcttcaggcaaatacgtgtagtcatcagatctgccctcctagatgtgaacactttacctgggaagggcaataccttggctctgctactttgcaagcacgtatggttcaatctgtctgtgcactgtgcccatgtggattctcactaattgtatggactatgccctgaatcccaaagcaagggaatgggatgccattcagccatctcagattcatactcccaggtgaggaactagagatcagctgagacgccaaaataattgtgagcacgagttcactgtttctcatggctttcttttcacctttatgaagccataccagaatgtggcctcaggggttcaggagctgtccaggtctgtagattcccaattttcccattcagtggagatttgacagtcatagtgagaaatgatcagccaccactcttccgagttgagagaaaataaaaatgttcctaaaaagtttgcatttaacagagatcctctctggcccaggtctctcctgtgggctgagacagagcaagacaggtgacccctagggagccccagaagtactatgggtgtgtgcactgggactcttcttagctctggggagtaaccatggcaacatacatgtcattcccgttcaacatttgcaggcctacggagacgctgttttgcttttcacaggaaatcacagctttgtcatttagtccttcaagcagcccacgttgaaatcaacatgccccaaactagtcattatcttccccatctttacacatccttccccctcctaaaaacactgcctcctccccgtacccatgttccctgccttattgatgtctcacctgttgcccaagctggagacccagagtcacatgtttcccttcacgactggcttgaggaactctcatataattatttatttacatggtgtttctcccatcagactgtgaggccctcaggaggccccagatgtcataatcccttctgtatccctgtgcctggcagagtctcagaggcctcaaaagggcttgtcaatattggttgaccaaatgcacccagtcaggggcacatggagcagtgagttaggggattgtttttgaattggtctctcagcaagagtgaatttgtgtgagtgatgctggcgtgcgctgtgccagggcccctctgccagcatccacctgtactggagctcaggaggtcggcctccaattctcactcttctctcctctcaagcccttttctattcccaactgactctacatcagaaagtagctgtggtctgtttccgcagacctctcatggcatctggcgggatctgacttgctagactctgccaggttagggcaggtatgtttttgcagcttccaaatgcaggccattcaacgtggttctcagatgcctatttctatagaaactgtgatgttttctacataatactgaaatcccagaatcacaggctgcctaggaatgtagatatgattttgttccctggataaggaaatgtagatattattttgttccctggataaggaaagtgagtaccagcaaggtgaagtggcttgcccttagccaaacccagatagaaatgcagatcttttggctcacacagaccaatcctcagtcctttacagtaggggctggcaaaccttctctgcaaagggccatgtagtaactattaaaataattaggctaggtgcattatacagtctctgatgcaacgactcagctctgtccacttagcatgaaaaccaccataggcaatatttaaatgaacgggcacggctgtgttctgataaaactttatttacaaaagcaaacagcaggctggatttgatcctcaaaccatggttagtcaatccctgcactagaacgccgtgtggtccatgaaccaggagccttggccttgcatgggtgtgtgtcagaagtgcagactctcaagtcccactgcaggcctactgaagcagagtctgtatttcaacaagatctgctggtgatcgcacatacgctgaagtttttgagaagaactgcactggtaggtctggtttctcctccaaagaatatcaagaataaattttataaattagaaaaaggaagccaagggaggttaattgacctatcaaaggtcacactaattggtgcatctggtactggacccaagtcctagtattccaaacgtacaattctttctacaaaccccagagtaaccaccccaacccgaccccagcttcgcagtttctggctggtcctgacccaactcaaattcactggaaattcaagtgaagcaatcattcactctttctcagctgacgtctgaatgaagaagactctgactccagctgtgtctcctcccctctcccactcccttctgcaagacctgggagggcctggcgaggtggaaatgtgcctcaggaggctgctcagcatctgcagaggaaaaacttgctcacacaggtttgagctggagttgaactccaacttaattcctgcctcaggaggtttgctgctcaaaatagaaccacagagccaaggaacctttcacttttcacatacagaagaaaattctaggctaggctctttggcaggactagacaccttagtttttccctcttgcacttgcccatcttgacccccaaactagtctctgttcccctgcagaattcatagaccatttcatattgggcaccacctaagctccatcccacagcaaaactccgtcctggccacatgctctgcacagcctgaatgttggtattctctgtgatctgtttctatttggtgcaagaagtgtttttcttagtgagttgggcttccgtaacagaataccatggactgtgtggcgtaaacaacagaaatcgatctctcacagttctggaggctgggaagtccaagatcaagccacaagcactcttggttcctggtgagagtcttcttcctggtttgcggatggatgcttcttgctgtatcctcatgtggagagatcatctctcttggtctcttcttataaaggaactaatcacattcacaaggactccaccctcataatatgattatgttcctaagggcctacctccaaataccatcatattggaaattagggcttcaacatatgaatatggggggaggggaacacaaacattcagtccatagcagggtttaatcttcttaatcagcaaatatgtgttgggctattatttattgaatacctacttatgggacaaaaccattgcataattatttaatccactttatgtctcaggacactgaagctcagtaggattaagtgactgggccaaaatcacacagataacacacgatagagcctggactcaaacctgtcttcaagtatctaaggtgctccaagtctgcagaggaggagacaagaaaacaatatggtccaggcctcaagtagttggcaatctactatctacatgtaagaaatatctttagaacaatcgtgttaatattggcataatgagcaagcaccatggagtggaagagatgagtttataagagtgtgggaggcaaggaggtcttcccttcagcacatgtgccccagctgcccagcaccatgcaatgcagctagtaggtgatcaacaaatgtttgacgaacaaatgaatgaacaagatgaaatgcatgtgtgttagtcctgggagctcaaaaagatttgaaaagacagggagtaaaagaaaggcaacatgggctgggcactgaaacccagaagtagcaaagcaaagaccggaagatggagactgttcatggagtttgaacatgatcctttgaataataagaagagatgaagctttttcagccgggagcaataggatctgagagtcatgtgcagtttggatgagaaggaaggggaagaacctggcagtaacaaggccagtgaggagactaatgcagaatgcgggcttatggctccaaggcctcaaattgagagtcaacaacccaaaggggaagaatggacaaagccaacagtaagcaagggatggacagaggacactgccacacaggtgattcctccctccccaaaaaccacccagcaggacccctgctccttctcccaacaagctcagcctcttcctgcctgcctccacgcccaaacctctccccatcaccaggggcttctgttagcagagcagaggcatcagcagggacctttgcccctttgcacctccagcatgaggccagcgcccatctcttttcatcctcaggtctatttatccagcatgtgttaatcacttacttggatctagcactagatgccagaaatattttacattcatcgtctcattttaatcctctacagcacccccgaggaatattttatagattagaaaaacaaggcccagggagggttaattgacctatccaagactgcgttagctggtggatctgggactagagcccaaatcctagtattccaaacataggattctttccacacacacccaacaccctcccacacctcccccattctggccaaccctgacccaaccaccagaataaggccctccctgtcgtgactctcctccaactttgtctttctggagaatctgagatgatattagtgaatgtgattagttcccttataagatctttctgagatgatctctcaatagtaggtgctgtaggcagcctgttgagctgtgataagtttggccagtgcagatctctggaatgtaccttgtatatgccacgcctgagaatcaggattgagttaaggtggaaaatcttaccactaattgatttattttattacatacagtgtacccagaataagattcctgagctcagtgggtaaagtaatgccagataatataccaactagtattttaccttcgagccaaagaattcagcattccatttaataagatcatgtagccaaggcttccctgagaggagatgagaagaggctcacccccacccaagctcacctccctgccttcgggtaccctgtcactgcaaggtactttgtctctgccttgcgtcctttcaaatgagcttattttttgaatcgggccttggtttgaattccagctttagggtatgccagctatctgatattaggcaagtttcttagcctctgagcctgaagggtttgttgttgttgttaagttgggatagtagtttttaatggagttgccacaaggattgaaagaaaaacctttgttggatgcatagtttccaacatttttctcccattctgtaagctgtcggttaactctcttgatcatttcttttgctgtgcagaagctctttagtttaattagatcccatgtgtcgattcttgcttctgtcctttgtaaagctctaggctgcggagtctgtgcccagcactggacctcaccgggaccaccagatcaagattccatagctctgctggctcccaggccttaaaggacatccccacccttggcttctcttagaggcaggctcctgtcagacccttgcttcagagccactgggacattccccaccacacagctctgccggggcactgcctccccctctgaagcacctgaccctcatgcacagagctttcaaagtccacctcccacaacatacagcgccttcatcggagccctggagaatcccagaagataaagccacacagaatggaggacacatttttcccgtcccacccaccacacgagcaggttttcaggaaccaacaacaatggccattgtgtgcagggcctcacactttctcttgcctcagtgtagggctgtactgaatgttctgtcttctgcacagtgtgagaacaggtgaggtctcctacccatctgcccttgactcagcccattaggaaatccagcctccatcttggctggaaaagcataaatagaccttagggataggatgcctccatcctcaactggaggaaactgaggccctgaggagggaaatgatttttccaggtcacacaattagacagagccagaacagacaccacaattccagtcctgcccgctgggcccacatgtcgcttctccctcaggctctgcaggcctctcctcctccaaaagcagtggttctccctgcttctccttcctaactcttcccaatgggattatccagactcaaaggccactcaatgccctctggccacttacatgctttgatggggctttacagagccctgagagtagcagaaacccacaagccagtgtggcaagggcatggcacaaaggagcggggtacccaactggcctaagagtatccaacccatgccttaaagatgtctagaacctgctctgctcccaccttgctcagcccaggaacaagagaaggcaacctggatggttgtgggattgcaacacacacacacacacacacacacacacacacacacacacacacacagccgcagggaaaggaggggagttcattttcagataaaagggtgagctcctccctgttttggagtaaaaagaaaaaaaaggaataaagatgcttcacttgccagaggggcaagtcaccctaaattctcaaggtcataatctctctgctctttaccgtctctctgcctttctctttttcagaatcctcccccaaccttctcctttttttcacttatccttcccctccctccctttcattgccttcctcttcctccataaccttctctaagttacattaattaccatctacagaaggccatgcacttactgtgtagcaaagtcggaacttcttgagtacatccctttttaaagaaacataaaatcgcagtaagagcaagtgtttcttgagggccctctgtgtgctgctctgatcccatcctattcatacaaggtacttgagggcatcccttctaaacttcgagacaaccctgccagtgacttattgtatctattaatacattttccagataaaaggcagactcggaaaagttaagagtcttctcccaagtgacaggatcagacccaactctgtccgaagctcgtgctgtttcacaacctgtcacaggggtacattctctgtgctgggttcatggaagaccaaggaataagccctctgcctctctcctcatgacagggtcagtttctctggggaaagcattaatcacagagtattcttcagcttagttatggttgggatgcctgaaggcctggtgctttgagaggccaggcaggaacatgggggatgaagatggaccagttagagctttccttctttactcgtttgttcctggggaaccccagtccccttgccctgtggaagatcaggaaacagtctttagggattctttccgtttccccacccctaggcttttttcaggctacattgcctttgagctgcactttgaagctctttcgccaggagcagtgtttcatctgtgcagaccagtccaactgggaggctcagaggagctgagcagtgcccagccttgttgggctttgagtgcccaagccaccaaggacacatgcccatctccatggaaatttggaggcaggagaggagcccgaggacatgcctgccggcgccttagtgggctaagtctgcaaagaggcctgacagctcccactcacctgtctagactgtggggactgaatctggccccactgtaagcagagctgggcttgtgtcttttctttctgaggaggttaagaggttcccacacacacccagcgcttgtcagcttctcagtagcacaatgataagggacatggctttttacagatcactttcatattctttatctcttttgttctcaaaataacacagtgaagtagggtttatgattatccctgtatgggccgaattgtgtcccccaaaaattcgtgcgtcaaagaagccctaacccccagcacctcagactgtgactgtatttggagacagagccttaatgaggtgatcaagttaaaatgaggttatttgggtgggccctaatccagtccaactggtgtccttataagaagagatttggaaacacagagaaacaccaaggtccatatgcatggaggaatggccctgtgaagaggcagccagagggcagccagctgccagccaaagggaggggtctcagaggaaacccaccctgctggcactttgaccttggacttccagcctccagaaccgtgagaaaatacatttctgttgtttaaggcccccagcctgtggctgcttgtttgtggaagcctggtctgactaatacagcccctattttcaagatgtgaaaacaggctcagagagaacaaatgacctaccctaaatgacacagcaattaagatattagtcccatcctcaagaacttagtgtagagtttcccagcttttttctttacctctgtgactacagtttttctatcagtggctatttattaagtagtgacaaattcctgtttgcatttctaatgaatcagatgcatacccctcccggtaagagctcaacatgagcattggctaactagcattacccactgaactgacaggattccagcccaaacaatagcacctaacatctcagcacgccagtgctgctgtaacccaggtaaacagacagggcccacaggttttatcacatgacacagatgctctaaggtatggggcaggcttccttgccaccatggtggtgtggtttagaaattctgttggctccatacatagtcaggggccctgcccctccattcagggttgtttgattccctgggctgctccatggcagccccaagacctgaaccctggtgtgctgatggaaggggaagtggagtgggggtgggattgagggtagcaaagcatcctcttaagctaaggatatcccacacttcccaaaggcattgcaaaaggcgagtccaaatcaggacacccagagattcccctgcctcttaaatgattgattgaattttcactaatgcaaaaaagcaagcgggcactgggcgcggtggctcacacctgtaatcccagcactttgggaagccaaggctggcagatcacctgagatcaggagttcaagaccagcctggccaacatggtgaaaccccatctctacaaaaattaactgggcatgatggtgggtgcctgtaatcccagaaaattgggaggctgaggtgggagaatctcttgaacctgggaggcagaggttgcagtgagccaagatcatgcgattgcactccagcctgggagacaaagcaagactccaaatatcgggggaaaaaaaaaaagcaactgggatgagaatggacagaaaaattatgcaataaaggagagaggcaaaaaccaggctgggtagaaattgactgtcatatgcagattacatgagtgaattcatggaaagcctgttacccagtacaatctgggcaagtacagtcaggtttctatattcatgggttctgcatttgtagcttcaaccaagagcagatcaaagatttttttctaaatggatggttatgcctgtactgaacacatgtagacattttttcttgtctctattctttaaacaatacagcataacagctgtttacagagcatttgcattgtgttaggtattataagtaagctagagatgatttaaagtaacaggagcatgtgcactggttatatgcaaattccacactattttatatcagggacttgagcatctgttttggtatttgcaggggtcctaaaaccaatcccccattgataactgcagacaactatagttattattattattattgattattatctctttccttcttctggccaaacctgtcaaagtctttggctctaaagcatctatattattcagtttattcaacaaacatatatcaagaaccttttatatgccaaaggctggtctagttgctagagatacaaagataaacaaaacaagaacacagtcctgccttcaactcgcaatggagttgagagagtgatatgtacagagacagttgttgggtgagatccactatctaagcacagaagaaggaactagcatggtgcttggggcatcccaggaggctaaacaggagttgtccaagcagagggatgtttgcacacctagctaaggaacttgaacattgtttttgttttttgtttttattgtttgtttgttttggcttccagatgttcccaaagaaagactggacatgtcagatgtttcccagagtgttctgctagcatttactcatcagtgtcaagctcatctggagttctgacttttacaggaagtgtaaaactatgaggaatattgaagatttaagaaaatggttttagccttaatattacggcctagggactcttgtacacagctctaagaaggtagatagactgaccattgggagttgtccgggtgaatgtggagaaaaaggaaagtgaaactaatgtattttgggtgcccactctgtgccagccactttcacattcaggtctgccatttaaatctcataaccccactttgaggtcaatattattatttcaaattttccattgaaatagcaatagatcaaagcagtcatgaaataacttgttgacattcttcttcactccaacttctgtatatattttgggcagttttcttgcctaaggcccaagttctcaaacttaagtacgcctcagaatcttccagagggcttgtcagaacacagactgctgggcccaaactccagactgtctgattgggtaggtctggggtgtggcctaagaatttgcatttctaacaagttcccaggtgatgctgaggctgccggtccaggaccagactttgagaaccactgaccaatgggaatgatccacccaataacttagcccagtggttcccaaactgtgctcattttttcatcatctggaaatctttaaaaacaaagaccgatgcctagctcctatgctcacacattctgatttaattggtatagggtgcaacctggcattgttgtttttaaaagctccccaggtcattctaacgctcagcaaagtttaggaaccactggcctagcctcatttctcctagactctaatcccaccctccaacatccacttcagctgcccaccactgggactacaggtggaatttgtgcatcggctagtgcttttcacagcacctctccccaaccctctctttcactgtctcagaacagctttttctagaactccttaagtctcttactcaccttctcccttttcattcagtccatctcctttcctattcaacccagaccctgtggcacagtaattactgcagccatctcctgcccacagccaatatcatcaatgcccttatcttccttgttctttctttgactatatctacctgggagggtttgaggaggagcatctaagtcaaactgcaggcacagaagtttgaagttcattttgaacttgtggaagttgatgacacttgacctgagttttgatagacaagtgaaagtgggagaaagtatatgtagagtacatgtaaaagcacagaggaggaaacagtagggtttgcctggggaatgacatgttgtgtatgtctgcggcaggcatctagccccacaaagacaggaagtaaaactgcagaggcagccccttgccagatgggaattggaccttgggcatcaaaccagggaatgtgagcattatttttataactgtgaagagcagttgatatgtttttatacatgacttttgttataacattaatgcacacttataaaaaataagaaataccaaaaagcgtaaagaagaaaataacaattacctttaatttaattacctagaactcaccactgttaagattttgttgggatttgtccttttcttttatgcatattcttacctagttgagagaatgctatacaagtaagtttatatcctgccttcacacttaacattttaacataaacaatatttaatgttattgaaactttgtaaatattttaatgtcagcaaaaaaatttcatcatatagataccatatcacttatttcacttatttaactattcccatacaggaagaaatgggggtagggagatttcctgttgcaaatgatgccacaatgtacatatttgtatgaacttagtttctatcagtgattttcatgatcaataccaagaaagaaattaatggatcaagcagcaaggaagttttatacttagtaaaattggccaaattgtttccttcctatcagtttacgttttcagtgtgaaagtatgcacactgcatattccgttccccagcacttggtgttttgtttgtttgtttgttttaagacagagtctcactctgtcacccaggctggagtgcagtggcacaatcttggctcactgcaatttctgcctcccgggttcaagcaattgtcctgtctcagcctcccaaatagctgggattacaggcacccaccaccacacctggctaatgttttttgtatttttggtagagagggggtttcaccgtgttggccaggctggtcttgaactcctgatctcagatgatccgcctgcctcagcctcccaaagtgctgggattacaggcgtgagccaccatgcctggccagcacttggtattatgatgagtgccactgaggatttttcatatggggatgacataatcagatttgcatttcctggaggctgaactggatgggccagattggaacccccactgttgtccttgcttttcctcccttgcctccacattctcctttttctattttcccatttgttatcatcctcttttcttggagtgcttatattatatgttcactacacacaaaacactgtacaaggctttgctaccaaggaataaataagagcagtattgaaagtcctagctctatggatgtgacaagctcatgctggcccagagaccctcttcctctagctctggccaaaaagagtctctggacagtaattctccttaggaaaaaatactttttatattttccaatgaaattgccaagtaggtttattgcttaattatttttttcttcatcctgtgactttccagccccacacatgatcatccctgtgcctggaatgtccttcttccttcctcttttcaacccaaaaattaccttggcgctcattcatccttgaagacctcttttagaggtctgggacacctgccttctgtactttgccccagcagaatcagtcactcaggcttccttgatcctgcagttcaattgcagcattttctacacctaacttggtttctccctcttggctaagagcccttcaagaatagaacattttgcatcccaactcttacaagacagtgtctggcactgagttgttactcagtaactgttgaatgagtgagtgagtgagtgagtgagtgagtgagtgagtgagtgaattcctgttttactaaggtgcatacacattccatcttaaatactagtcagttgaagagtgtaaagacaatatggagatgacatgaattgccaaaatcacaccctgaatcattgatgcttaaggtaaaacagacacctggtataccagatgtctcaatctaaacattaattcctctgtgtgcctagacactgacttgcattctgttctttttcattttaactccaaatttaagttgtacctgagtatctctgtgatagaggaagtaaaggggattaagtgatgccagaatttcccaaaatgcgttcctaaaaaatggaagcggtgggttgtttataggcatcacacacaagaaaagggtcttgtggtcttataactttgggaaacaatgttacatagatttctttacctcaagacctctgtaggcattctaggaagtagaaggaaagatgagttcggcaatggtagagaagtaaaagagcaaccaggtcctgcctcagtggtagtcatctcagcctctctacaccagggaaaactcaaaggcaggatggcaaacagtatgccaagatcctagcccctttccctacaaatctcctcagtcccacatctgtgtaagcccctgcccccacccacccaccatgctgatgagatcagccttcattacttctcttctagagccaggaagcaaggtaatgtgtgggaagtgatagctgcaaggtaatgtgtgggaagtgataacaacttcggagttaaagccattcaacgggaaaatttgttaaaagaccaagacattgtaaagctgaaacacttgagtctattaagtcccctgcttcttagaacattttgttaccagggaatgttttaaggagggaaaacattggactatcacagcaccatcagacaccaaagcctggtacaaagaacaacagtttccaagacatctgtctctgccactcaagagacttctgcaaagttctgcttctcttttctccccctctctcctatcccaacatcaaccctcaaaccccctcacccctagacatactctatacctttctctcctcctcctcacccttttcctctccctcctccttctctctgtctttatcttacacacacacacacacacacacacatttatagcccatgttgttttcacagacactattggaatgacacagtgagctagaccatccaacgttattcaaccctctttggtaagaaggaggctaattaagtgactagaggtttagacattcattgtttattaggtccaaactccttcagagagcctggagcattctcctaaacaaacattaccctttcctggcttctttttccaagtccaaatgagatggagtgtttaaggagacagtatcttttcacaaacatgaagaaaggagtactagggcagaatgtgattgtcagtagatgtagagggggaaagctatgtgcctgtcacagaaagactgatgcaagccgtgtatctgttggcagctgatgtccattagtgatgtccattagtgatcgtcagtaatttagactagcaatgttgacacatttgtggtcagcccaatggtttgtttaactgtcttcactaggaatacatccgtcaagagattgttttttaaacaatagttagccttctaaacaagagtaaagacaaactcaaatatctccttgccaatcttaacactgttatactataccaggaggcactttagaagacagaagccacctgttatataagcaatagcattaacatagacacagttttctagtttgtggatattaagaggatgttagtgattagccacaacttatgagaaagctactcttgccttggtaggcaaaggaatggaaagcttttttaaaatctgccgttttattttgcttctgttttaaataaatgaaagttgtgctggaaaagtgagttttgagcccaacatcaaacattaatcctgctactgctttcacaagaaactggggaagcaccatccaagcctcagcaatgctgaagaaaaggacctcatctaggttgtgaatgagaagcaaatcccactgtgggagaccactggtcctgagtgactctgagcctgagcctcctacttcctgcccctccttttctactgtgggctcacagactctgatgttggtgaaatgttcttttccttggcttggattaggcacctggtgtcctgaaagaggtcattggttttcctgaggacgtccaaggaggctggctcaccagtggcttaccacaggccaaatttgaggttaattaaccatcagtcattgtcagtggggccaaatgttattcagacattcagagaagagagacttggtccagctttgggtaatggccctcattaacattccttcctatcctagttccaaaccaatatgtctttagctgcataggggttgaaaataatcagaaatagctggttcatcatttatgtcactctacatttgaagagacttcttgatatggtaacctatttattggatatatatgatgtctgaatcaaaatcttttttcactaaaactgaccatctcctcatgaaaaggtacatttattgatctttggggaaacaccctattcagagtgaatatgaaaaaggtgtttggtgggagatgaagggatacagacattggccatctggggaccagactttctggccagaacttgtctgaggaacacagagatgtgtatgcactacttttgctgtctcgctctgcagacctcagtgaccagctccttgaagtggtggggctagaaggagccatggagatggggcagatctacaccggcctgaagagtgcaggcaggaggctggcccagtgcgcctctgtcaccatcaggtatgcctctttgtcacccaacagcctctgcatctccccgcctgcgtacacattcatgcagacaactgagaagccatctttggattttagggcagggagagtgcagcacaaaagcttgataatgtttgtaaagaacgtctttgtagaccatttcccaaacaggatataatgcgcccatctaaaacatcaactggaggacacaccacaaccagtttgctgttctgttaaactgagctggtgaagttctctaaacaggagtataagattaaatggtccagagaaccaaaggtccaactccttggtgtttttatatttgcaaattaaaatgttagatagatggcagagggatgccagagggcacactctgataaaaaaaagatgtctcttctctgctctactccttctcagacagtgacctgagaaacactatttcctatacacctttgtatgctaagccatcaacatcagcaaaactggcataattgacagacaggatgacaactctaggggatggaccacacaggttagccactgtaggctcctggaagagatgaagtctaatcgagaggatcctctgatttcagttgcctctgattaatcaatgcagctcatcacattttgtctgagattcttctcccacctgattatttcagaagtctttattcctttcctttttcactgaattactatggaccaaatctattaacatgccttggggatctccgagaggagtccacaggatactgggtttcccaaaggtatttgaccacagaactcttttctcccagaacctcctgggcaagtgtcatcagagcacattggaagaaactctgcccttggcaccacactgcattcctcagaaaggtccccagagcggattccctgaggtctcttagctgaaggtctgctccactgaccccttttcttcatttcccctctttgttttctgtcttttctattccccaaagctttgctctcctttctttctgagctgttgtcatgatggggtccctgttttccagattaattcttgaggcctgtctattctccaggactctaatactgaggaggtccagtctgttaacacatctaagccataacttatgaagaccacagagaacagaacatcctgatccttgaggaatctgaaagccatgtataaggaggaggactttttcttcacattcagtagctctatttccagatagaaacagagggggtgagccaggagccccatcctcctggccatttcctgaatactatccccagcctcaagagccaaaatgccactctttactcttgtttttgttagtagatttattgtttttattattaaataccctcagggtcaatcagagaatcatcacatcagaagatagcttttccctcccattttataatttcaagaacagaacagttgccatacccaggtgagggcttctatgtcaatgggtgataactgttccctgctcacccagaccagaggcctccaaaagagcctgccttttcttccaaaagcaatgtattatgaattcataactcttctgcagagggaagtcagaagacttcatctctctccttttaaaacctatggcgggctgtggtggctcacgtctgtaatcccaacactttgggaagcttgaggagggaaaattgcttgaggccaggagttcaagaccagtaggggcaacatagcaagacccccttctacaaaagattttaaaattagccaggtgtggtgatgtgcacctgtagtcctagctactcaggaggttgaggtaggaggatcgcttgagcccaggaggtcgaggctgcagtgagctataatcatgtgactgtactccagcctgcgaaacagagtgacaccctgtctctttttaaaaaattcatatgccaaggtcagaaaagccttgcctcaagcaagaaggcaacactttcacctctcctctggggagagtattcctagatgaccccctttcccaggtaagccaggcccacagtccatgcaaccccagagtgtgcttattcaggagatttttaaaaaggattgaggttgggccaggcgcggtggctcacgcctgtaatcccagcactttgggaggccaaggcaggcagatcacgaggtcaggagatcgagaccatcctggccaacatggtgaaaccctgtctctactaaaaatacaaaaaaaaattagctggacatggtggcaggcacctatagtcccagttactcgggaggctgaggcaggagaatggtgtgaacctaggaggcagagcttgcagtgagccgagatggtgccactgcactccagcctgggcgcagagcaagactctgtctcaaaaacaaaacaaaacaaaaaccaggactgaggttagaatagattgcaaggcaagacacactcagacctgagctgtatgttgtataaattggagacattacctcattgacatgatgcaacctctcactcaacatagagaccaggccaattcccctttcagagtggagtttttggcacgtactctgggccttctagctgactgtttgaggagcacctgctcagtggtggcgctgccacgctcactggccactgtatcccagacttctgtggacttcactgctcatccacagcagtatttctcaaagtggggtctgaggaccgaggcagtagaatcccctgtagtgcttattaaaacacagacccggccgagcgcagtggctcatgcctgtaatcccagcactttgggaggccaaggcaggcggatcacctgaggtcgggagtttgagaccagcttgaccaacatggagaaaccccgtctctactaaaaatacaaaaaattaactgggtgtggtggcacatgcctgtaatcccatctactcgggaggctgaggaaggagaattgcttgaatccgggaggcagaggttgcagtgagccaagatcatgccattgcactccagcctgggcaacaagagcggaactccatctcaaaacacacacacacacacacacagacacagaaacacagaccactgggcctggcccccagacctgccaagttagactccctgaggtggtctcagaaatctatttttaacaagttctccaaaagagtcttagagaaccacacttaggtaggcagataaggttttcctacttctgttttcctggtgggaataaccttgattctcccacttgaaaaagctcactgtgttctcttggtgttctgggttccaggacaaacaagctgctgccaatgcaagtggatggagaaccctggatgcagccatgttgcacggtgagtcttgccaatctttgagatggggatgagaagccttatttttgagcccttttgggcactgacttaatatgaaatcactgaatctcagagtcacagggactgtggaagattatctagtgcaacccctcttccactttattatccatccactcatttacctggcaactcttaatgaaaacctgctatatgccagacactgtgaagcgccggtcacaaaattgaatgagacatagaaccaacttcgaggagttcacagttctagtcagtgaattctgagacttcatctactgtatcctggacagcctcagcttgaatcatgtcaatggcaaggaatttactacctcaaaaggaagactgttctgctgatgaacaagtcaaattgcttccttacgtggaagccaaatctacacacttaccttacctagaatttggtagggtagcgcctttgactgctggagctcccgggagaaaattcctcgcagagcacagacatgcctcccagtcggtgcacccaaagccctgataacctacttgaaaattccactgaatgagtcaccacgcaggttatctattttgtttatggcactgtcacccagaacgtagaacagtgcctggtttgtaatagttgcacaataatacatgtcaaatgatgaataaaagactgaacaaatgaactaacaaaaatagactatctccattcccagacttaccatatccgttagctctccctttagcactaggacaggagccatgcatccttccttcttagtttgtcctcagttagaaatgcagctagaatctcgtggtgaagagcaatcgtcgtcctggttttcagggcctctgctgggatactacatgcgtaataccctcaataagattgcagctatgcaaatttcaaaagacaaaagtggagtttctaagcttcctcactctagtggagtattcagatactttgatcacctgctattttgagccctccagaacatcaaattgtcttctactaaaggaaggtttccatgaacctgctgagaaaaggtagcatcttctataaaggttatcaaaaacagaaatttctctgcaaaaatcttacctcaatcttatgaagaccaagaaaaaaatgaaaacacactatatcaaataatagctttccaccttgctggagttaggacgcatagagggaatttctactatttatcatttgatggaactgagttgagaagaatctatccaagttccttttatctccaacccccctacaaaaaaaaaggtggaagaaatcaaaccctctcctacctggttcagtcctagctgaaaactggattgctattcctataaattcaagcactggattttgaaatagccaaatgcttctccctatgcccacacccacccttcctccataccaccctttagagattacaactcactatgaaaaaatttgtgaaccaatgatttcatagtgtgaggcccagaaatccgtatgtaaaggtatattcgtctgctttgagtgccataatagaataccacagactgacagcttaaacaacagaaatttattttctcacagttctggaggctgacaacacaagaccaaggtgccggaagggctggtttctggggaggcctctcttcctaacttccaacggctgccttcttgttgtatcctcacatggcttttcctctgtgtttgtacactcttttctcttcttataaggacaccagttctaagggattatggcccccccgccccttgtgacctcatttatccgttattacctccttaaaggccctacctacaaatatagtcacactgggggttaggaattcaacatatgaatttgggggggacacaatttattccataacagaaggtaacagaaaatcattcttaaacttgcaagggttaaaacccatgtaccccttgttgaaacatcttcttgaaggtatacaccaactaagaagtgattcaaaattaaagccttaagaatggactatcacagcccaaaagaacttttggtaaaaatggaaaccagtgaaattagaatgaagtttccaaaaacctgctaaatatgtttatgcaataaatgcaaatggcaaaaaatcattctttgaaagagaagacatatcatgtaaatattaataacctgtatcccaaacctgagattatattaacaaaggccaaaaacatgcaggagacactgctgaaggaatagtaaagatatgtgaagtttctcattgtctctcttcactttgatgacaaaacgtataaatcagaagataattttaataggtagacaatcactagcgaaactaaaaatagggtgcacacctttcaaatctggaagaatttaaaatatataaaccctattaatgtagcacaggatagaaagcaaaaaataagccaacatttaaaaattttttgaagcaagttgaatgatgttaagactgtatatatataatatatatataaaagaaaaatagatgagttaaaattccctattaaaagatcaatactctcatattgagttaaaaatgaaaatccaaatatatgcttcttacaaaagatacatctaaaatgaaaggttatacatacgtatatataatatatatcttattttatcctttatcaggtataaagaaattaaaaggaagacatagtaatgttaattatgctaattttaggcaaactaacctttccatgtgcctaaagcataaagcagaataagtaaacacattttttatttgataaaaagtacattcaattatgagatatagtggtcataaaatgttagatatttaataacagaatcaaaatatataaaaaactatcaatacatattctgagaaaaggttgatatagaattgacagacagatattgagaagcttgaaaatatttgtttccatctttgaggttaagtagcaaaaaaataaatgcttggatgaaataactctataactcataaagaaattaaatatcatatttgttcaggcattcatatttattaaactagatcataaactagtttacaaggcaaaaagctccataaaatccagttgcagaaattataaaggtcattttctttgaccacaaagtaataaagctagaaattactaatagaagattaagtgaataaacaaaatttagtcacttggagacttaaaaattctcctaaacaacaagagatttatgaggagatcaaagccaccatggtagattactcaaaaaattacaaaaataagaaggctccagtttaaaaattatagaatatagcctaaactatatttggaagtaaattaaaagcctcataatcttccatcatataaaaaagaagtaaaatgtaatgaataatactaaaattagaagagcaataataaaacaatcttaggagaagcagaaggaagaaaataataaagataaaagaagaaaataactaaaaacaggaaactctagaactagttcttaaaatatgtcaaatgtttgaaaacctaatttttaaaagagaaaggaatcaaacatattaaaaggtaaaaaatataaatgtaatataaaaatataaatataactgtgtccgtggctttatttaaatataaaacaaggccgggcgtggtggctcatgcttataatcccagcactttgggaggctgaggcacgaggattacttgaggtcaggagtttgagaccagcctgaccagcatggctaaaccccatctgtaccaaaaatacaaaaattagccaggcatggtggcccatgcctgtaattccagctcctcgggaggctgaggcatgagaatcgcttgaactcagaggcagaggttgcagtgagccaagatcacactactgcactccagcctgggcgatggagtgagactctgtctcaaaagaaaaaaaattgtaaaacaaaatatacaatcatcttgattctaatgaacttgaacatcttaagaagatgaatgaaaatcctggtaaccattaatgaaactaaattatttcaaagaattacatactaaatgatcttaaaacagatggccttattggtgagatcttccatactactaggaaatacgtatttaggtgaactgtttcatagtacagacaaagatggaaggctactcaatccattttatgaaatgaagacatgcaataacctaacaaaaattacatttaaaaatagaagactatagactatagactatatataaatatgacataagaattctagttaaaagtattggtaggtagaattgaacaatgtattaaaagaatcattcacccctatgagcatattaaaggaacaaaggaaagtcttctactattagtttaaatagaaaaactacatgataaaatagatgacccaaaagtattcaattacattcaacatttctgatttttaaagataaaaactcctgaaaactaagatcagaaagcttctcccctactaatgaatacctttgttaaatatatgttaaaccataaccaatattttacttaatagtaaaacactagaggaattctcactaaaatcatgaacaagacatgtatttttaacattggaaattttagccaatgcaatatatacttgaagcagaaaagaaatgtaattagaaaatataattagaaaaagaaatataattatttggaaaagagtcaaaactgtcattatttgtaggtggtatgattatgaacataaaaagctaatagaataaactgaaaacctcaaaggataaattacttcaataaaaccctatagaaaaaatggacaaatattaagttttccggcattaatattaatagtataccagcaataatcaattcaaaggatataattaaagcttaaaatatcattatataagcaataaaagacataaaatactaaactgaactgtgtaaaatgcatgaagatgactataagatttaaccaataaagaaaaaaaaaaaggatttgaacacagaacatcccatgttcctgaacagggatcccaaaatcccaatgcaattgtttctttaactctacaaacaatgcaatttctaggatgttttataaaagaacgctgagaaataacttctcgcaagatattaaaataattataaagccacaataatttgaataacatgctattggcatgataatggatagataaatcaatagtacagaagcaagccttgagaaaccctagtatacataaaaactaatgaaggaaagagaaagattataaactaattaggtaggcatgaactgtttagcatatgatatccaagaaattgcgtttcagaaaatgtctttatatagaacctctcacctcaaactatattccaaaaacaaaaccaaagcaaaaaaaagccccccagttcaattacagtattaaatgttcttagctaccagaaaaaaaatagatgatcataattacactgggggcagggattttctaaggaaaaagggacatatttgactgttaaccaattttaatttctacaagtcaaaaatcaatatagaatcttcgaaagactaaggacaagatgtttgcaatcgctatcccaaagatcaggttaattctcacaaggtataaagaaaccagctattagaatccagcggaaaaaaaaaatactaacaatgcaatagtgaacagagaattcatagaagaagtgtcatgggctaataaatctatgaaataatatttaatatcacaagtttttaaaaaaggaagaaaagattttcaaattaaaacagtgagaaaggcatgccatgtttcactgaccaattagcacagctgttttgtctttatattcattgctgtcaagggtatggggagaccaggacactcatacagtgaggcaagagtatcaacagttacagccattctgaaaagcatgtagacccatgtgtcaagaactgttataaatattaatatacgttgatctagttcatttactttcacttttaaaaattgttcatatacttctaggaatttattctaagtaaaatacagattaccagaaatacagagagattgatatataagaatgtcacgtctacattacttatcattgcaaaaagttggaaatttcctaaaaatttccttaaaatgcccaacatttagggaaaggtttcagctgggcacagtggctcatgcctgtaatcccagcactttgggaggctgaggcaggcagatcacgaggtcaggagttcaagaccagcctggccaacatagtgaaacctcgtctgtactgaaaatataaaaaattagccgagcatggtggtgggtgcctgtaatcccagctattcaggagactgaggcgggagaatcacttgaacccgggaggcggaggttgcagtgagccgagatcacgccgttgcactccagcccaggcgacagtgcgagactccatctcaaaaccaaacaaaaacaaaaacaaaacaaaaccaaaataaaacaaaaacagaagcccatatttgtttatatatgtatatacaaacatatatatatatttattcgggaaacttgtctcattattattacactgtaagatgatctctcgtgcttcaccatcacagttaggtggcataatctgagcctcaaaattcagaatcttctcccagagttagacgatagcagaatctcaaagtcaaagatgatcctacttatctagtctggtgattctcagacttgagtatgcatctacataacctacaggggttctgaaacacagattgctgggccacatcccagattttctggttcagtaagtctggatgccagagagttttcatttctaacaagttccaaggtgatgctgatgctgctggcctatgagccacactttgagaactaatgacgtagttgaacttcccaactcatcaataaatcccacacttcttccccaccctctgcaaaacctgattgtccagttacattcttttttttttctttttcttttctttttttttttttttttttgagacagagtctcgctctgttgtctaggctggagtgcaatggcacgatctcggctcactgcaacctgtgcctcccaggttcaagtgattctcctgccttggcctcccaagtagctggaattccaggcgcccactaccacacctggctaatttttgtattttttagtagagacgggatttcaccatgttggcgaggctggtctcaaactcctgacctcaggtgatctgccccacctcggcctcccaaagtgccaggattacaggtgtgagccactgcgcctggccttgtccatttacattcgaaggcctctgatggcaggaaacactgtcaggaagcagcacattctaggatcttggagagcccggaaacaactaagaccggaaagccatgcaaaccttcctcctcccttaggctcaccatatttctttaacttttaaaatatcgcagagactatttgagaccttccagatttgtgcctttctatgcatctccagttcaaattacagcagacctcagacacttttcttttttgttgttttgttgttgttgagacaaggtctcactttgtcacccaggctggagtacagtggcgagaacacggctcactgccgcctcgacctcccaggctcaagcgatcctctcacctcagccttccaagtagctaagggcgcgcctccacgtctagctaatttttgtattttttgtagagacgaagtttcaccatgttccccaggctggtcttgaactcctgcgctcatgcgatctgcccctctgggcttctcaaagtgctgggattacaggcgtgagccaccgcgcctggcccctcagacacctttcaaatggtttgggaagggttcacacttcaggttattggccattttactaggcattatctgaattacacaccctgagaaggcaacattcaggaagaagtccctcaatctcttgcttctcttgaagtaataagaatgtgttggtttgcagaaaacagcccccaacaaagtcaatccccagcactagtgaagttcacatttttattctattttaaaggggaaattacatgctgtaatagttttgtgaacttcgaactatcatgcaagagtctagtgtatcaattctctctgtgatcaaacagaaaactatgcactaagctgctgatcttagcacttggccaggtgctgtcagtgatgtgaatagtttttaagaaaatcatggagactttagttaatggcctgactcgcccaattaccaaagaagcttgggtgctaactacagaaacgtgggatgacctctttctatcagggtttgaaaaggcaggcttagccacatccaactacctcctaaaataggatcataactattttacctgctagcccctaatttgagggtaagggactgatatctctttgactggaaatgaggatatgatttcatacttctttcggttctatagtaatagaatccacaaagctgaccaaaatattatgttacccaggagccccagactcctaccctgtcaagacctttgtcagaaccgctgaaaaacaagcaggagagatttgagttttacttcctcttccgtgccctggaggtactaactagcaaataaatagctcagctaaagggataaaaaagagaagcaagggtcttgtgtcatctaaataaaaaaaaaaaaaaaaaaaaggccgggcgcggcagctggtgcctgtaatcccagcactttgggaggccgacacgggcggatcatgaggtcaggagatcgagaccatcctggccaacatggtgaaaccccgtctctactaaaaataaaaaaattagccaggcatggtgataagcacctgtagtcccagctactcaggaggctgaggcagaagaatcgcttgaacctgggaggtggaggttgcagtgagccgagattgcatcactgcactccagcctgggtgatagagcgagactctgtctcaaaaataaaaaaatgtgggggaggggctctaccagcgggaaatgtaggcaccagctaccatcctctgcttccaacagagccatctccactgccagcacgtagggcttatcagtcagtacttccacagtgtgttgtaccctgaacaggcactgcactggctcagagagtgccgtggtgaataagctgaagtccttcccctcatgggcatgggagatcaggagtgagagaaggctgaccacaggggaacatgccacaaacgtgttccacaggggaacaaagaatgctacattgcatgccacagataagtgctgtccgagtctccagtctccagcctatgcctcgcttccgtgcgtcctgggataaacataatgcccacaataagacacacagcacaaaatgatgttgatgcattctcggttttctcctctggtgactatcaaaaaacagagactctctccccttttaggtctctgggctggtggaagccaacataaggatcattttcagcttttagcaccaggttatgctaattgtccacagtgtcttctggttctatccttcccttccatttcctggagccctttatttttattttatttttttgagatggagtctctctctgtcgcacaggctggagtgcagtggtgcaatcttggctcaccacaacctccgcctcccgggttcaagtgattctcctacctcagcctcccacgtagctgggattacaggtgcctgccaccacctccaactaatttctgtatttttagtacaaacggggtttcaccatgttggccaggctggtctcaaactcctgggctcaagtgatccgcccatctcagcctcccgaagtgctgggattacagttcctggagccctttcaatgtaaacctggcttacagtagtgccctcttagccaggcactcactaccccagctcaccttgacaacagctgttaaataatttccctcaaactcttttcttttgtgtcatgttattctccagcacagaatgccatctctcatgcttcctcatttcttcatgtgaacccagtctttctgcctccctttaaaaccccacaccagctgccccacctgtgtccatgaccacatttctcatagtttgccctgaactcaacctgctcatctgtgacttctctacccactcccttttcatcaacacatttcctttccttccttcagattttaaaattctttcctccttgttcccatcagacttttctcattccatgcccaccttgttttggacaccacttggtttagccgacattgatttaaactcgttgatggttctgtgttcaagagttctgttgttccctgcggtcacactgtcatttcctataatgtggtaaaaaccacaagaatgagttcataggttctgtttcttttgacatccatctttctccttctctttctccataagacaaggattttactaactgttactttccattttacagtttacagtgggctttcattgacaatctattctttgatctttgtgaggaaaataagacaaatgttatcctcctcatttacagttcagtaagcactggctctgaagagtcaatgattcatctaaatgttcacagcaaagaagtggaagtgtctggactcaaacccaggtctttgaattctaattgcttcctgttcccacttcatcgtcctactctgagcattatcatacttaataaatattgtggatggataatgtagattattaaggtggcaaggccacactcaggtaggaattaactatttcaaagccatgacctgaggataaggttgggaataaaggcaaaaatgagaatacatcagtgtctttcacttctgattgacttaaagtttacaggaggaaacacttataaaccctaaaatttaaagaaaaaaaagttttaaaaagaatttggggtcttccctcgaaggccaagaaaagaggaaatacataaggcactcaattgggaactctccacataatggtgcttggtcagaggtcagaccaaagcctcggtcacttgattgacatctcagcactgccttggcaggaatgaccaggagcaatggaggctgggaatctgaagaactgggctctaattgtgctgctgctctgtttgtgaacttaggctactctaatgggctcctgcagaggggtcgattgagtccctgaggtctcctctggctgtgacattctgagagtctgtgaataccaagaacacaagacaggtgtgagctgatcaccacgtgggaagctcacacctgtctctccccagtgcttccgcccctcacttccagccgtgccaaactccaggcccagtcagggtcaagttgccaattttgaagccgttcaaggacagttgtccttctgcatggggctccttccatcctgaagctggcctttcctttctctgcgactcactctcccttaggctactgagatttgcatgccactaattcatttctgcctctttgcttttagattaaaattactcacaagaaccaagcgcccatgatgatggggcctccccagaagagcagcttcttctcgttgagaaggaagagccgttcaaaagactaaacagtgtgccaaacaccagctaaaccaagagagaaagcaagaaactataatgcacactcacacacaatttatgtgcacactcacacatgcacacacacacacacatacacactcttctctaaccagtggaagcaaagccacccttcgggaagaaaacgtcaccttgccatacattctgtttcaacagtgggtacacccctaacagagccagtgccaacaaaacattttgaatggacttagggcccatgaggttgtggctggcttaggcagcaacctccacattcccacaggccttgagcagaattttctgagactgaagggaaatccccctttctttctaccagccctgcaagtttcctcatggacgctcgcgaggagcaggctgcaggtttcctgcctatggtgagatcagatgtggccaagggaaggagctctggttccagagaatttgcacaaagttccctctgtacagagacaaaacggcctccggctctcagagcataatccttggcagggctcagcaggcgcacgttggtttcttggtcgtcctttgagtgacaacttctccgtgaacctgctgaagaggcagaaaggctgtggaaagctgtatttccattcttgggtttctgcgccgtcggtgggcacttgttattttccaggaaccttctcctggtgtctacatgtttgcttagaggcggctccaagagcccccagagctgcctgcatagcacaccttagatgtggtatttattttcttagttctgtgaacacctgggagggagagcggagaaactgggatttatttttcaaattggtgtcataatattgtgtaaaaagggaaggaaaaaaaaaaccacccccagcttctttctttttcaagccaaagcgtgtttcctgtttgagttccaagccctggtggcagactattcctgaaggcagaaaagatgggaaggaaggaactttgctggggaaaccaggagacggttccctcctgcttctttgcactcaccactcccagagtatgacctgaaggaccttctgatggtcttaacgtgtgtgcgcgcgtgtgtgtgtgtgtgtgcgtgtatatatatatatttagcctatatatttatatatatatatatataaatatttatttactgatggacttttcctcattggaaaaaaaaaacataggtagtatgagacagaaagtggtaaggaaaaagaaggttctcactcccccactccaccgtttcattgtcaggacgcatctccctgtggtgatcacaagggttaaggggaatgaaagtagctccctattatgaacgaagagaccgagaactcctattctggatcctcaaaacaagcatgaaagacctgctgggctggatttactctcccatttgtcagataagaaaattgagtctcagaaaagttcagagacttttccatggtgtcttggctaatgcagcttgagagtaggtgccgttacaaagatatttaatggagaaaagaacccacacatctcagagtagggtcatttctggtcactgaaaagtgagtccacttggatccaggttgccagggaggaacaaacgtacagcacatgcgtggatgggatatccccacacaagaaaacgagcgcctcatgctgcttcccagaggttctctctgacctgaatggaaaagaagttggtctgagatcgaaggtactaaacagatcatcagactgaactctccacatgtcacctcatcatggtcatcatagtctcttagtttggaaacaaccttggctgcagggatgacctcagtggagagtcacaagaaggactgaggcgtcttctgcaagatactgccagccaggacagaggggtctcagcagagctcagtgggcttcattcagcaagtgccagcattaccatcctttcccaagggcaaggccatgcagagcttcattgggcctccatccctctctgagatttatcagtggaaacttggacccacttgatatcgttccactgagctgcctctaatcttgcattggacaggagctttggacaaagaagggaatattaagattgtgtgtacaaatggcacttaactgtgaaggaccacctaggagcaagatcttggaccattctgctcaacctaacagtgcagaatgctaagtaaggggaaaaccaggccacctgaagaatatctttaatgatggtattcttggtgatgggaccaacaagctccagaattactacaggtactatcttggaagccacttgtttctgaaactgaggcaggttcaggtttggggtcactgattctaagacatttacagaagttcgtgcatgtgtttcagccatgatccccaagattgaggctattgagacatggcactatcaacaggtgaaattgattctcagagactcacaggtctcatgaaggggcagtgcagaaaatggcccttacctgctgcaccctagtgcacaggacttgcaatgttgcttgagagacatatcccaagtccttcttagaggcatggagtataacaacttcagtggaattgcacttccagtttggtaaccttagtaaatcttgtgttgttgtttaatcgtgccttgcaaatcatcctttaaacactatgactgtggtttcttgtggtggagtccctcatcatagtgaccctcatagcaacctctgaggttagcagagaaggtattattatctcgatctcaatgaggagaacaaggcttaatgaggtttagtgacttctcaaagccacatggttagtcaggggagaacctaatcccttatttcttatcttattctgattctggccatgctacaaacatgttctcacctgccccccatgcttctaccccaacagcaataaaaactgtaaagcaggaa

(The sequence listing continues in the following parts.)
